(19) United States
(12) Patent Application Publication
(10) Pub. No.: US 2008/0050809 A1
(43) Pub. Date: Feb. 28, 2008

(54) Novel human kinases and polynucleotides encoding the same

(76) Inventors: Alejandro Abuin, The Woodlands, TX (US); Gregory Donoho, Indianapolis, IN (US); Carl Johan Friddle, The Woodlands, TX (US); Glenn Friedrich, Houston, TX (US); Brenda Gerhardt, Spring, TX (US); Erin Hilbun, Denton, TX (US); Yi Hu, Spring, TX (US); James Alvin Kieke, Houston, TX (US); Brian Mathur, Nashville, TN (US); Daniel Mathur, Wooster, OH (US); Maricar Miranda, The Woodlands, TX (US); Michael C. Nehls, Stockdorf (DE); Boris Nepomnichy, Dickinson, TX (US); Arthur T. Sands, The Woodlands, TX (US); John Scoville, Pearland, TX (US); C. Alexander Turner, The Woodlands, TX (US); D. Wade Walke, Spring, TX (US); Xiaoming Wang, Itasca, IL (US); Nathaniel L. Wilganowski, Houston, TX (US); Amy Qiongshu Xie, Needham, MA (US); Xuanchuan Yu, Conroe, TX (US); Brian Zambrowicz, The Woodlands, TX (US)

Correspondence Address: LEXICON PHARMACEUTICALS, INC., 8800 TECHNOLOGY FOREST PLACE, THE WOODLANDS, TX, 77381-1160, US

(21) Appl. No.: 11/165,424

(22) Filed: Jun. 23, 2005

Related U.S. Application Data
(63) Continuation-in-part of application No. 10/766,691, filed on Jan. 28, 2004, now abandoned.
Application No. 10/766,691 is a continuation of application No. 09/671,050, filed on Sep. 27, 2000, now Pat. No. 6,716,616.
Application No. 09/671,050 is a continuation-in-part of application No. 10/762,759, filed on Jan. 22, 2004, now abandoned.
Application No. 10/762,759 is a continuation of application No. 09/707,121, filed on Nov. 6, 2000, now Pat. No. 6,720,173.
Application No. 09/707,121 is a continuation-in-part of application No. 10/936,445, filed on Sep. 8, 2004, now abandoned.
Application No. 10/936,445 is a continuation of application No. 10/446,175, filed on May 27, 2003, now Pat. No. 6,806,073.
Application No. 10/446,175 is a continuation of application No. 09/733,388, filed on Dec. 7, 2000, now Pat. No. 6,602,698.
Application No. 09/733,388 is a continuation-in-part of application No. 10/828,828, filed on Apr. 21, 2004, now abandoned.
Application No. 10/828,828 is a continuation of application No. 09/765,068, filed on Jan. 18, 2001, now Pat. No. 6,746,861.
Application No. 09/765,068 is a continuation-in-part of application No. 09/783,320, filed on Feb. 15, 2001, now abandoned.
Application No. 09/783,320 is a continuation-in-part of application No. 10/984,548, filed on Nov. 8, 2004, now abandoned.
Application No. 10/984,548 is a continuation of application No. 10/217,745, filed on Aug. 12, 2002, now Pat. No. 6,838,275.
Application No. 10/217,745 is a continuation of application No. 09/802,117, filed on Mar. 8, 2001, now Pat. No. 6,444,456.
Application No. 09/802,117 is a continuation-in-part of application No. 11/125,295, filed on May 9, 2005, now abandoned.
Application No. 11/125,295 is a continuation of application No. 10/620,845, filed on Jul. 15, 2003, now Pat. No. 6,908,758.
Application No. 10/620,845 is a continuation of application No. 09/841,683, filed on Apr. 24, 2001, now Pat. No. 6,617,147.
Application No. 09/841,683 is a continuation-in-part of application No. 11/025,671, filed on Dec. 29, 2004.
Application No. 11/025,671 is a division of application No. 10/010,720, filed on Nov. 13, 2001, now Pat. No. 6,858,419.
Application No. 10/010,720 is a continuation-in-part of application No. 09/854,856, filed on May 14, 2001, now Pat. No. 6,541,252.
Application No. 09/854,856 is a continuation-in-part of application No. 11/115,086, filed on Apr. 26, 2005, now abandoned.
Application No. 11/115,086 is a continuation of application No. 10/306,879, filed on Nov. 25, 2002, now Pat. No. 6,902,923.
Application No. 10/306,879 is a continuation of application No. 09/883,134, filed on Jun. 15, 2001, now Pat. No. 6,511,840.
Application No. 09/883,134 is a continuation-in-part of application No. 11/046,668, filed on Jan. 28, 2005, now abandoned.
Application No. 11/046,668 is a continuation of application No. 09/940,921, filed on Aug. 28, 2001, now Pat. No. 6,900,045.
Application No. 09/940,921 is a continuation-in-part of application No. 10/462,887, filed on Jun. 17, 2003, now abandoned.
Application No. 10/462,887 is a division of application No. 10/217,357, filed on Aug. 9, 2002, now Pat. No. 6,610,537.
Application No. 10/217,357 is a continuation of application No. 09/975,326, filed on Oct. 11, 2001, now Pat. No. 6,476,210.
Application No. 09/975,326 is a continuation-in-part of application No. 10/843,129, filed on May 11, 2004, now abandoned.
Application No. 10/843,129 is a division of application No. 10/430,797, filed on May 6, 2003, now Pat. No. 6,773,906.
Application No. 10/430,797 is a continuation of application No. 10/004,542, filed on Oct. 23, 2001, now Pat. No. 6,586,230.
Application No. 10/004,542 is a continuation-in-part of application No. 10/948,842, filed on Sep. 23, 2004, now abandoned.
Application No. 10/948,842 is a division of application No. 10/434,034, filed on May 8, 2003, now Pat. No. 6,815,188.
Application No. 10/434,034 is a continuation of application No. 09/992,481, filed on Nov. 19, 2001, now Pat. No. 6,593,125.
Application No. 09/992,481 is a continuation-in-part of application No. 10/934,072, filed on Sep. 3, 2004, now abandoned.
Application No. 10/934,072 is a continuation of application No. 10/419,279, filed on Apr. 17, 2003, now Pat. No. 6,803,221.
Application No. 10/419,279 is a continuation of application No. 10/014,882, filed on Dec. 11, 2001, now Pat. No. 6,593,126.
Application No. 10/014,882 is a continuation-in-part of application No. 11/114,906, filed on Apr. 26, 2005, now abandoned.
Application No. 11/114,906 is a continuation of application No. 10/413,437, filed on Apr. 11, 2003, now Pat. No. 6,902,924.
Application No. 10/413,437 is a continuation of application No. 10/020,079, filed on Dec. 12, 2001, now Pat. No. 6,579,710.
Application No. 10/020,079 is a continuation-in-part of application No. 10/791,666, filed on Mar. 2, 2004, now abandoned.
Application No. 10/791,666 is a continuation of application No. 10/028,946, filed on Dec. 20, 2001, now Pat. No. 6,734,009.
Application No. 10/028,946 is a continuation-in-part of application No. 11/127,567, filed on May 12, 2005.
Application No. 11/127,567 is a continuation of application No. 10/071,879, filed on Feb. 8, 2002, now abandoned.
Application No. 10/071,879 is a continuation-in-part of application No. 10/919,196, filed on Aug. 16, 2004, now abandoned.
Application No. 10/919,196 is a continuation of application No. 10/103,546, filed on Mar. 20, 2002, now abandoned.
Application No. 10/103,546 is a continuation-in-part of application No. 10/655,490, filed on Sep. 4, 2003, now abandoned.
Application No. 10/655,490 is a continuation of application No. 10/103,547, filed on Mar. 20, 2002, now Pat. No. 6,759,527.
Application No. 10/103,547 is a continuation-in-part of application No. 10/803,277, filed on Mar. 18, 2004, now Pat. No. 6,919,192.
Application No. 10/803,277 is a division of application No. 10/116,326, filed on Apr. 4, 2002, now Pat. No. 6,777,545.
Application No. 10/116,326 is a continuation-in-part of application No. 11/035,027, filed on Jan. 13, 2005, now abandoned.
Application No. 11/035,027 is a division of application No. 10/843,136, filed on May 11, 2004, now Pat. No. 6,861,241.
Application No. 10/843,136 is a continuation of application No. 10/116,332, filed on Apr. 4, 2002, now Pat. No. 6,864,079.
Application No. 10/116,332 is a continuation-in-part of application No. 10/798,773, filed on Mar. 11, 2004, now abandoned.
Application No. 10/798,773 is a division of application No. 10/141,634, filed on May 8, 2002, now Pat. No. 6,734,010.
Application No. 10/141,634 is a continuation-in-part of application No. 11/032,674, filed on Jan. 10, 2005, now abandoned.
Application No. 11/032,674 is a division of application No. 10/803,278, filed on Mar. 18, 2004, now Pat. No. 6,861,240.
Application No. 10/803,278 is a division of application No. 10/196,927, filed on May 20, 2002, now Pat. No. 6,797,510.
Application No. 10/196,927 is a continuation-in-part of application No. 10/872,762, filed on Jun. 21, 2004, now abandoned.
Application No. 10/872,762 is a continuation of application No. 10/171,374, filed on Jun. 13, 2002, now Pat. No. 6,841,377.
(60) Provisional application No. 60/156,511, filed on Sep. 28, 1999.
(60) Provisional application No. 60/164,289, filed on Nov. 8, 1999.
(60) Provisional application No. 60/169,428, filed on Dec. 7, 1999.
(60) Provisional application No. 60/176,690, filed on Jan. 18, 2000.
(60) Provisional application No. 60/183,582, filed on Feb. 18, 2000.
(60) Provisional application No. 60/184,014, filed on Feb. 22, 2000.
(60) Provisional application No. 60/188,449, filed on Mar. 10, 2000.
(60) Provisional application No. 60/199,499, filed on Apr. 25, 2000.
(60) Provisional application No. 60/201,227, filed on May 1, 2000.
(60) Provisional application No. 60/206,015, filed on May 19, 2000.
(60) Provisional application No. 60/211,572, filed on Jun. 15, 2000.
(60) Provisional application No. 60/216,382, filed on Jul. 7, 2000.
(60) Provisional application No. 60/229,280, filed on Aug. 31, 2000.
(60) Provisional application No. 60/239,821, filed on Oct. 12, 2000.
(60) Provisional application No. 60/243,893, filed on Oct. 27, 2000.
(60) Provisional application No. 60/252,011, filed on Nov. 20, 2000.
(60) Provisional application No. 60/254,744, filed on Dec. 11, 2000.
(60) Provisional application No. 60/255,103, filed on Dec. 12, 2000.
(60) Provisional application No. 60/289,422, filed on May 8, 2001.
(60) Provisional application No. 60/258,335, filed on Dec. 27, 2000.
(60) Provisional application No. 60/267,583, filed on Feb. 9, 2001.
(60) Provisional application No. 60/278,202, filed on Mar. 23, 2001.
(60) Provisional application No. 60/277,168, filed on Mar. 20, 2001.
(60) Provisional application No. 60/282,036, filed on Apr. 6, 2001.
(60) Provisional application No. 60/282,031, filed on Apr. 6, 2001.
(60) Provisional application No. 60/289,727, filed on May 9, 2001.
(60) Provisional application No. 60/293,248, filed on May 24, 2001.
(60) Provisional application No. 60/297,856, filed on Jun. 13, 2001.

(51) Int. Cl. C12N 5/06; C07H 21/04; C12N 15/00

(52) U.S. Cl. 435/325; 435/320.1; 536/23.2

(57) ABSTRACT

Novel human polynucleotide and polypeptide sequences are disclosed that can be used in therapeutic, diagnostic, and pharmacogenomic applications.

### 1.0 CROSS-REFERENCE TO RELATED APPLICATIONS

[0001] The present application is a continuation-in-part of: co-pending U.S. application Ser. No. 10/766,691, filed on Jan. 28, 2004, which is a continuation of U.S. application Ser. No. 09/671,050, filed on Sep. 27, 2000, which issued as U.S. Pat. No. 6,716,616 B1 on Apr. 6, 2004, which claims the benefit of U.S. Provisional Application No. 60/156,511, filed on Sep. 28, 1999; co-pending U.S. application Ser. No. 10/762,759, filed on Jan. 22, 2004, which is a continuation of U.S. application Ser. No. 09/707,121, filed on Nov. 6, 2000, which issued as U.S. Pat. No. 6,720,173 B1 on Apr. 13, 2004, which claims the benefit of U.S. Provisional Application No. 60/164,289, filed on Nov. 8, 1999; co-pending U.S. application Ser. No. 10/936,445, filed on Sep. 8, 2004, which is a continuation of U.S. application Ser. No. 10/446,175, filed on May 27, 2003, which issued as U.S. Pat. No. 6,806,073 B2 on Oct. 19, 2004, which is a continuation of U.S. application Ser. No. 09/733,388, filed on Dec. 7, 2000, which issued as U.S. Pat. No. 6,602,698 B2 on Aug. 5, 2003, which claims the benefit of U.S. Provisional Application No. 60/169,428, filed on Dec. 7, 1999; co-pending U.S. application Ser. No. 10/828,828, filed on Apr. 21, 2004, which is a continuation of U.S. application Ser. No. 09/765,068, filed on Jan. 18, 2001, which issued as U.S. Pat. No. 6,746,861 B2 on Jun. 8, 2004, which claims the benefit of U.S. Provisional Application No. 60/176,690, filed on Jan. 18, 2000; co-pending U.S. application Ser. No. 09/783,320, filed on Feb. 15, 2001, which claims the benefit of U.S. Provisional Application Nos. 60/183,582, filed on Feb. 18, 2000, and 60/184,014, filed on Feb. 22, 2000; co-pending U.S. application Ser. No. 10/984,548, filed on Nov. 8, 2004, which is a continuation of U.S. application Ser. No. 10/217,745, filed on Aug. 12, 2002, which issued as U.S. Pat. No. 6,838,275 B2 on Jan. 4, 2005, which is a continuation of U.S. application Ser. No. 09/802,117, filed on Mar. 8, 2001, which issued as U.S. Pat. No. 6,444,456 B1 on Sep. 3, 2002, which claims the benefit of U.S. Provisional Application No. 60/188,449, filed on Mar. 10, 2000; co-pending U.S. application Ser. No. 11/125,295, filed on May 9, 2005, which is a continuation of co-pending U.S. application Ser. No. 10/620,845, filed on Jul. 15, 2003, which issued as U.S. Pat. No. 6,908,758 B2 on Jun. 21, 2005, which is a continuation of U.S. application Ser. No. 09/841,683, filed on Apr. 24, 2001, which issued as U.S. Pat. No. 6,617,147 B2 on Sep. 9, 2003, which claims the benefit of U.S. Provisional Application Nos. 60/199,499, filed on Apr. 25, 2000, and 60/201,227, filed on May 1, 2000; co-pending U.S. application Ser. No. 11/025,671, filed on Dec. 29, 2004, which is a divisional of U.S. application Ser. No. 10/010,720, filed on Nov. 13, 2001, which issued as U.S. Pat. No. 6,858,419 B1 on Feb. 22, 2005, which is a continuation-in-part of U.S. application Ser. No. 09/854,856, filed on May 14, 2001, which issued as U.S. Pat. No. 6,541,252 B1 on Apr. 1, 2003, which claims the benefit of U.S. Provisional Application No. 60/206,015, filed on May 19, 2000; co-pending U.S. application Ser. No. 11/115,086, filed on Apr. 26, 2005, which is a continuation of U.S. application No. 10/306,879, filed on Nov. 25, 2002, which issued as U.S. Pat. No. 6,902,923 B2 on Jun. 7, 2005, which is a continuation of U.S. application Ser. No. 09/883,134, filed on Jun. 15, 2001, which issued as U.S. Pat. No. 6,511,840 B1 on Jan. 28, 2003, which claims the benefit of U.S. Provisional Application Nos. 60/211,572, filed on Jun. 15, 2000, and 60/216,382, filed on Jul. 7, 2000; co-pending U.S. application Ser. No. 11/046,668, filed on Jan. 28, 2005, which is a continuation of U.S. application Ser. No. 09/940,921, filed on Aug. 28, 2001, which issued as U.S. Pat. No. 6,900,045 B2 on May 31, 2005, which claims the benefit of U.S. Provisional Application No. 60/229,280, filed on Aug. 31, 2000; co-pending U.S. application Ser. No. 10/462,887, filed on Jun. 17, 2003, which is a divisional of U.S. application Ser. No. 10/217,357, filed on Aug. 9, 2002, which issued as U.S. Pat. No. 6,610,537 B2 on Aug. 26, 2003, which is a continuation of U.S. application Ser. No. 09/975,326, filed on Oct. 11, 2001, which issued as U.S. Pat. No. 6,476,210 B2 on Nov. 5, 2002, which claims the benefit of U.S. Provisional Application No. 60/239,821, filed on Oct. 12, 2000; co-pending U.S. application Ser. No. 10/843,129, filed on May 11, 2004, which is a divisional of U.S. application Ser. No. 10/430,797, filed on May 6, 2003, which issued as U.S. Pat. No. 6,773,906 B2 on Aug. 10, 2004, which is a continuation of U.S. application Ser. No. 10/004,542, filed on Oct. 23, 2001, which issued as U.S. Pat. No. 6,586,230 B1 on Jul. 1, 2003, which claims the benefit of U.S. Provisional Application No. 60/243,893, filed on Oct. 27, 2000; co-pending U.S. application Ser. No. 10/948,842, filed on Sep. 23, 2004, which is a divisional of U.S. application Ser. No. 10/434,034, filed on May 8, 2003, which issued as U.S. Pat. No. 6,815,188 B2 on Nov. 9, 2004, which is a continuation of U.S. application Ser. No. 09/992,481, filed on Nov. 19, 2001, which issued as U.S. Pat. No. 6,593,125 B2 on Jul. 15, 2003, which claims the benefit of U.S. Provisional Application No. 60/252,011, filed on Nov. 20, 2000; co-pending U.S. application Ser. No. 10/934,072, filed on Sep. 3, 2004, which is a continuation of U.S. application Ser. No. 10/419,279, filed on Apr. 17, 2003, which issued as U.S. Pat. No. 6,803,221 B2 on Oct. 12, 2004, which is a continuation of U.S. application Ser. No. 10/014,882, filed on Dec. 11, 2001, which issued as U.S. Pat. No. 6,593,126 B2 on Jul. 15, 2003, which claims the benefit of U.S. Provisional Application No. 60/254,744, filed on Dec. 11, 2000; co-pending U.S. application Ser. No. 11/114,906, filed on Apr. 26, 2005, which is a continuation of U.S. application Ser. No. 10/413,437, filed on Apr. 11, 2003, which issued as U.S. Pat. No. 6,902,924 B2 on Jun. 7, 2005, which is a continuation of U.S. application Ser. No. 10/020,079, filed on Dec. 12, 2001, which issued as U.S. Pat. No. 6,579,710 B2 on Jun. 17, 2003, which claims the benefit of U.S. Provisional Application Nos. 60/255,103, filed on Dec. 12, 2000, and 60/289,422, filed on May 8, 2001; co-pending U.S. application Ser. No. 10/791,666, filed on Mar. 2, 2004, which is a continuation of U.S. application Ser. No. 10/028,946, filed on Dec. 20, 2001, which issued as U.S. Pat. No. 6,734,009 B2 on May 11, 2004, which claims the benefit of U.S. Provisional Application No. 60/258,335, filed on Dec. 27, 2000; co-pending U.S. application Ser. No. 11/127,567, filed on May 12, 2005, which is a continuation of U.S. application Ser. No. 10/071,879, filed on Feb. 8, 2002, abandoned, which claims the benefit of U.S. Provisional Application No. 60/267,583, filed on Feb. 9, 2001; co-pending U.S. application Ser. No. 10/919,196, filed on Aug. 16, 2004, which is a continuation of U.S. application Ser. No. 10/103,546, filed on Mar. 20, 2002, abandoned, which claims the benefit of U.S. Provisional Application No. 60/278,202, filed on Mar. 23, 2001; co-pending U.S. application Ser. No. 10/655,490, filed on Sep. 4, 2003, which is a continuation of U.S. application Ser. No. 10/103,547, filed on Mar. 20, 2002, which issued as U.S. Pat. No. 6,759,527 B2 on Jul. 6, 2004, which claims the benefit of U.S. Provisional application Ser. No. 60/277,168, filed on Mar. 20, 2001; co-pending U.S. application Ser. No. 10/803,277, filed on Mar. 18, 2004, which is a divisional of U.S. application Ser. No. 10/116,326, filed on Apr. 4, 2002, which issued as U.S. Pat. No. 6,777,545 B2 on Aug. 17, 2004, which claims the benefit of U.S. Provisional Application No. 60/282,036, filed on Apr. 6, 2001; co-pending U.S. application Ser. No. 11/035,027, filed on Jan. 13, 2005, which is a divisional of U.S. application Ser. No. 10/843,136, filed on May 11, 2004, which issued as U.S. Pat. No. 6,861,241 B2 on Mar. 1, 2005, which is a continuation of U.S. application Ser. No. 10/116,332, filed on Apr. 4, 2002, which issued as U.S. Pat. No. 6,864,079 B2 on Mar. 8, 2005, which claims the benefit of U.S. Provisional Application No. 60/282,031, filed on Apr. 6, 2001; co-pending U.S. application Ser. No. 10/798,773, filed on Mar. 11, 2004, which is a divisional of U.S. application Ser. No. 10/141,634, filed on May 8, 2002, which issued as U.S. Pat. No. 6,734,010 B2 on May 11, 2004, which claims the benefit of U.S. Provisional Application No. 60/289,727, filed on May 9, 2001; co-pending U.S. application Ser. No. 11/032,674, filed on Jan. 10, 2005, which is a divisional of U.S. application Ser. No. 10/803,278, filed on Mar. 18, 2004, which issued as U.S. Pat. No. 6,861,240 B2 on Mar. 1, 2005, which is a divisional of U.S. application Ser. No. 10/196,927, filed on May 20, 2002, which issued as U.S. Pat. No. 6,797,510 B1 on Sep. 28, 2004, which claims the benefit of U.S. Provisional Application No. 60/293,248, filed on May 24, 2001; and co-pending U.S. application Ser. No. 10/872,762, filed on Jun. 21, 2004, which is a continuation of U.S. application Ser. No. 10/171,374, filed on Jun. 13, 2002, which issued as U.S. Pat. No. 6,841,377 B1 on Jan. 11, 2005, which claims the benefit of U.S. Provisional application Ser. No. 60/297,856, filed on Jun. 13, 2001; each of which is herein incorporated by reference in its entirety.

### 2.0 CROSS-REFERENCE TO SEQUENCE LISTING SUBMITTED ON COMPACT DISC

[0002] The present application contains a Sequence Listing of SEQ ID NOS:1-279, in file “SEQLIST.txt” (2,891,776 bytes), created on Jun. 23, 2005, submitted herewith on duplicate compact disc (Copy 1 and Copy 2), which is herein incorporated by reference in its entirety.

### 3.0 INTRODUCTION

[0003] The present invention relates to the discovery, identification, and characterization of novel human polynucleotides encoding proteins sharing sequence similarity with animal kinases and membrane proteins. The invention encompasses the described polynucleotides, host cell expression systems, the encoded proteins, fusion proteins, polypeptides and peptides, antibodies to the encoded proteins and peptides, and genetically engineered animals that either lack or overexpress the disclosed polynucleotides, antagonists and agonists of the proteins, and other compounds that modulate the expression or activity of the proteins encoded by the disclosed polynucleotides, which can be used for diagnosis, drug screening, clinical trial monitoring, the treatment of diseases and disorders, and cosmetic or nutriceutical applications.

### 4.0 BACKGROUND OF THE INVENTION

[0004] Kinases mediate the phosphorylation of a wide variety of proteins and compounds in the cell. Along with phosphatases, kinases are involved in a range of regulatory pathways. Given the physiological importance of kinases, they have been subject to intense scrutiny and are proven drug targets.

[0005] Membrane proteins can serve as recognition markers, mediate signal transduction, and can mediate or facilitate the passage of materials across the lipid bilayer. As such, membrane proteins are also proven drug targets.

### 5.0 SUMMARY OF THE INVENTION

[0006] The present invention relates to the discovery, identification, and characterization of nucleotides that encode novel human proteins, and the corresponding amino acid sequences of these proteins. The novel human proteins (NHPs) described for the first time herein share structural similarity with animal kinases and membrane proteins, and more particularly: serine/threonine protein kinases, cell division protein kinases, and cyclin dependent kinase (SEQ ID NOS:1-15); calcium/calmodulin-dependent protein kinases and serine/threonine protein kinases (SEQ ID NOS:16-20); serine/threonine protein kinases, casein kinases, and particularly casein kinase I gamma isoforms (SEQ ID NOS:21-23); cell division control protein kinases, serine/threonine protein kinases, NEK2 and NY-REN-55 (SEQ ID NOS:24-29 and 73); membrane-associated guanylate kinases (MAGUKS) (SEQ ID NOS:30-72); G-protein coupled receptor kinases (GRKS) (SEQ ID NOS:74-78); multifunctional calcium/calmodulin dependent protein kinases (SEQ ID NOS:79-81); serine/threonine protein kinases, ribosomal protein kinases, and cAMP-dependant kinases (SEQ ID NOS:82-90); mitogen activated protein (MAP) kinases, serine/threonine protein kinases, P21-activated protein kinases, and NPK1-related protein kinases (SEQ ID NOS:91-154); myosin kinases, particularly myosin III kinases, unconventional myosin classes of proteins, and kinases associated with signal transduction (SEQ ID NOS:155-159); serine/threonine kinases, calcium/calmodulin-dependent kinases, MAP kinases, and kinases associated with signal transduction (SEQ ID NOS:160-165); NIMA (never in mitosis A) related kinases, serine/threonine kinases, calcium/calmodulin-dependent kinases, myosin light chain kinases, and kinases associated with signal transduction (SEQ ID NOS:166-175); serine/threonine kinases, calcium/calmodulin-dependent protein kinases, mitogen activated kinases, and kinases associated with signal transduction (SEQ ID NOS:176-179); receptor tyrosine kinases, particularly ephrin-receptor family kinases, and kinases associated with signal transduction (SEQ ID NOS:180-184); receptor tyrosine kinases, particularly NEK family kinases, serine/threonine kinases, and kinases associated with signal transduction (SEQ ID NOS:185-186); receptor tyrosine kinases, particularly calcium and calmodulin dependent kinases, sequences encoding PK 80, serine/threonine kinases and kinases associated with signal transduction (SEQ ID NOS:187-189); serine/threonine kinases, tyrosine kinases, TGF-beta activated kinases, and a variety of growth factor receptors (SEQ ID NOS:190-192); serine/threonine kinases, casein kinases, calcium/calmodulin-dependent protein kinases, mitogen activated kinases, and kinases associated with signal transduction (SEQ ID NOS:193-232); serine/threonine kinases, Citron kinases, and particularly Citron rho-interacting kinases (full length versions of previously reported proteins that were erroneously presumed to be full length) (SEQ ID NOS:233-236); mammalian proteins having structural domains in common with proteins of the immunoglobulin (Ig) super family, which are often found on the cell surface and can be exploited by human pathogens to gain entry to the cell (SEQ ID NOS:237-247); receptor tyrosine kinases and kinases associated with signal transduction (SEQ ID NO:248-257); receptor tyrosine kinases and especially kinases of the membrane-associated guanylate kinase (MAGUK) family (SEQ ID NOS:258 and 259); serine/threonine kinases, carbon catabolite depressing kinases, and kinases associated with signal transduction (SEQ ID NOS:260-265); serine/threonine kinases, calcium/calmodulin dependent kinases, and myosin light chain kinases (SEQ ID NOS:266 and 267); adenylate kinases, phosphotransferases, and kinases associated with signal transduction (SEQ ID NOS:268-271); serine/threonine kinases, G2 protein kinases, and kinases associated with signal transduction (SEQ ID NOS:272-276); and serine/threonine kinases, calcium/calmodulin dependent kinases, and rho-associated kinases (SEQ ID NOS:277-279). Accordingly, the described NHPs encode novel kinases having homologues and orthologs across a wide range of phyla and species.

[0007] The novel human polynucleotides described herein encode open reading frames (ORFs) encoding proteins of: 187, 356, 324, 198, 347, 315, 893, 385, 357, 422, 1035, 1214, 1007, 296, 72, 318, 94, 108, 375, 137, 473, 249, 155, 184, 520, 296, 195, 224, 560, 336, 211, 240, 576, 352, 553, 353, 514, 225, 236, 407, 396, 2382, 2245, 982, 2229, 2092, 829, 2136, 1999, 2354, 2217, 954, 2201, 2064, 801, 2108, 1971, 2322, 2185, 922, 2169, 2032, 769, 2076, 1939, 2294, 2157, 894, 2141, 2004, 741, 2048, 1911, 238, 1236, 974, 922, 255, 683, 654, 388, 398, 766, 765, 942, 308, 692, 817, 1036, 870, 864, 764, 751, 654, 648, 548, 535, 895, 889, 789, 776, 982, 976, 876, 863, 957, 951, 851, 838, 2054, 1958, 311, 223, 606, 497, 635, 2271, 999, 2267, 2042, 1651, 455, 778, 762, 703, 385, 479, 94, 645, 482, and 359 amino acids in length (SEQ ID NOS:2, 4, 6, 8, 10, 12, 15, 17, 19, 22, 25, 27, 29, 31, 33, 35, 37, 39, 41, 43, 45, 47, 49, 51, 53, 55, 57, 59, 61, 63, 65, 67, 69, 71, 75, 77, 80, 83, 85, 87, 89, 92, 94, 96, 98, 100, 102, 104, 106, 108, 110, 112, 114, 116, 118, 120, 122, 124, 126, 128, 130, 132, 134, 136, 138, 140, 142, 144, 146, 148, 150, 152, 154, 156, 158, 161, 163, 165, 167, 169, 172, 174, 177, 179, 181, 183, 186, 188, 191, 194, 196, 198, 200, 202, 204, 206, 208, 210, 212, 214, 216, 218, 220, 222, 224, 226, 228, 230, 232, 234, 236, 238, 240, 242, 244, 246, 249, 251, 253, 255, 257, 259, 261, 263, 265, 267, 269, 271, 273, 275, and 278, respectively).

[0008] The invention also encompasses agonists and antagonists of the described NHPS, including small molecules, large molecules, mutant NHPS, or portions thereof, that compete with native NHPs, peptides, and antibodies, as well as nucleotide sequences that can be used to inhibit the expression of the described NHPs (e.g., antisense and ribozyme molecules, and open reading frame or regulatory sequence replacement constructs) or to enhance the expression of the described NHPs (e.g., expression constructs that place the described polynucleotide under the control of a strong promoter system), and transgenic animals that express a NHP sequence, or “knock-outs” (which can be conditional) that do not express a functional NHP. Knock-out mice can be produced in several ways, one of which involves the use of mouse embryonic stem cell (“ES cell”) lines that contain gene trap mutations in a murine homolog of at least one of the described NHPs. When the unique NHP nucleic acid sequences described in SEQ ID NOS:1-279 are “knocked-out” they provide a method of identifying phenotypic expression of the particular gene, as well as a method of assigning function to previously unknown genes. In addition, animals in which the unique NHP nucleic acid sequences described in SEQ ID NOS:1-279 are “knocked-out” provide a unique source in which to elicit antibodies to homologous and orthologous proteins, which would have been previously viewed by the immune system as “self” and therefore would have failed to elicit significant antibody responses.

[0009] Additionally, the unique NHP nucleic acid sequences described in SEQ ID NOS:1-279 are useful for the identification of protein coding sequences, and mapping a unique gene to a particular chromosome. These sequences identify biologically verified exon splice junctions, as opposed to splice junctions that may have been bioinformatically predicted from genomic sequence alone. The sequences of the present invention are also useful as additional DNA markers for restriction fragment length polymorphism (RFLP) analysis, and in forensic biology, particularly given the presence of nucleotide polymorphisms within the described sequences.

[0010] Further, the present invention also relates to processes for identifying compounds that modulate, i.e., act as agonists or antagonists of, NHP expression and/or NHP activity that utilize purified preparations of the described NHPs and/or NHP products, or cells expressing the same. Such compounds can be used as therapeutic agents for the treatment of any of a wide variety of symptoms associated with biological disorders or imbalances.

### 6.0 BRIEF DESCRIPTION OF THE FIGURES

[0011] No Figures are required in the present invention.

### 7.0 DETAILED DESCRIPTION OF THE INVENTION

[0012] The NHPs described for the first time herein are novel proteins that are expressed in, inter alia, human cell lines, and: human brain, pituitary, spinal cord, spleen, trachea, kidney, prostate, testis, and adrenal gland cells (SEQ ID NOS:1-13); human brain, pituitary, cerebellum, spinal cord, thymus, lymph node, bone marrow, trachea, kidney, liver, prostate, testis, thyroid, adrenal gland, pancreas, stomach, small intestine, colon, skeletal muscle, uterus, placenta, mammary gland, adipose, esophagus, bladder, cervix, rectum, pericardium, hypothalamus, ovary, fetal kidney, and fetal lung cells (SEQ ID NOS:14-15); human fetal brain, pituitary, cerebellum, thymus, spleen, trachea, lung, testis, thyroid, adrenal gland, pancreas, colon, uterus, and fetal kidney cells (SEQ ID NOS:16-20); human brain, pituitary, cerebellum, spinal cord, thymus, lymph node, bone marrow, trachea, kidney, liver, prostate, testis, thyroid, adrenal gland, pancreas, salivary gland, stomach, small intestine, colon, skeletal muscle, heart, uterus, placenta, mammary gland, adipose, esophagus, bladder, cervix, rectum, pericardium, hypothalamus, ovary, fetal kidney, and fetal lung cells (SEQ ID NOS:21-23); human fetal brain, brain, pituitary, cerebellum, thymus, spleen, lymph node, bone marrow, trachea, kidney, liver, fetal liver, prostate, testis, thyroid, adrenal gland, pancreas, salivary gland, stomach, small intestine, colon, uterus, placenta, mammary gland, adipose, esophagus, bladder, cervix, rectum, pericardium, hypothalamus, ovary, fetal kidney, and fetal lung cells (SEQ ID NOS:24-29 and 73); human brain, pituitary, cerebellum, thymus, spleen, lymph node, bone marrow, trachea, kidney, liver, fetal liver, prostate, testis, adrenal gland, pancreas, salivary gland, stomach, small intestine, colon, skeletal muscle, uterus, placenta, mammary gland, adipose, skin, esophagus, bladder, rectum, thyroid, umbilical vein endothelial, and fetal lung cells (SEQ ID NOS:30-72); human fetal brain, adult brain, pituitary, cerebellum, spinal cord, thymus, kidney, fetal liver, prostate, testis, adrenal gland, small intestine, skeletal muscle, uterus, placenta, mammary gland, and pericardium cells (SEQ ID NOS:74-78); human brain, pituitary, cerebellum, kidney, prostate, testis, thyroid, adrenal gland, pancreas, salivary gland, heart, uterus, cervix, pericardium, fetal kidney and fetal lung cells (SEQ ID NOS:79-81); human fetal brain, brain, pituitary, cerebellum, spinal cord, trachea, kidney, prostate, testis, thyroid, adrenal gland, pancreas, salivary gland, stomach, adipose, and hypothalamus cells (SEQ ID NOS:82-90); human fetal brain, brain, pituitary, cerebellum, spinal cord, thymus, spleen, lymph node, bone marrow, trachea, kidney, prostate, testis, thyroid, adrenal gland, pancreas, salivary gland, stomach, small intestine, colon, skeletal muscle, uterus, placenta, mammary gland, adipose, esophagus, bladder, cervix, rectum, pericardium, hypothalamus, ovary, fetal kidney, and fetal lung cells (SEQ ID NOS:91-154); human pituitary, lymph node, kidney, testis, thyroid, and fetal kidney cells (SEQ ID NOS:155-159); human pituitary, lymph node, kidney, colon, and prostate cells (SEQ ID NOS:160-165); human fetal brain, brain, pituitary, cerebellum, spinal cord, thymus, spleen, lymph node, bone marrow, trachea, lung, kidney, fetal liver, liver, prostate, testis, thyroid, small intestine, heart, uterus, placenta, mammary gland, adipose, esophagus, cervix, rectum, fetal kidney, and fetal lung cells (SEQ ID NOS:166-170), human pituitary, kidney, thyroid, skeletal muscle, and heart cells (SEQ ID NOS:171-175); human fetal brain, brain, pituitary, spinal cord, testis, adipose, and esophagus cells (SEQ ID NOS:176-179); human fetal brain, brain, pituitary, spinal cord, cerebellum, trachea, kidney, fetal liver, liver, prostate, testis, thyroid, stomach, small intestine, colon, uterus, adipose, esophagus, bladder, cervix, and pericardium cells (SEQ ID NOS:180-184); human pituitary, thymus, spleen, lymph node, bone marrow, trachea, kidney, prostate, testis, thyroid, adrenal gland, pancreas, salivary gland, stomach, small intestine, skeletal muscle, heart, uterus, placenta, adipose, skin, bladder, rectum, pericardium, ovary, fetal kidney, fetal lung, gall bladder, tongue, aorta, 6-, 9-, and 12-week embryo, adenocarcinoma, osteosarcoma, and embryonic carcinoma cells (SEQ ID NOS:185-186); human fetal brain, brain, spinal cord, thymus, lymph node, trachea, lung, prostate, testis, thyroid, adrenal gland, stomach, small intestine, skeletal muscle, uterus, placenta, mammary gland, skin, bladder, pericardium, hypothalamus, fetal kidney, fetal lung, tongue, aorta, 6-, 9-, and 12-week embryo, and embryonic carcinoma cells (SEQ ID NOS:187-189); human fetal brain, brain, pituitary, cerebellum, lymph node, trachea, kidney, liver, prostate, testis, thyroid, adrenal gland, pancreas, stomach, small intestine, colon, skeletal muscle, heart, uterus, and fetal kidney cells (SEQ ID NOS:190-192); human fetal brain, brain, pituitary, cerebellum, fetal lung, kidney, and embryo cells (SEQ ID NOS:193-232); human testis, small intestine, fetal kidney, 6- and 9-week embryo, adenocarcinoma, osteosarcoma, and embryonic carcinoma cells (SEQ ID NOS:233-236); human pituitary, thymus, spleen, lymph node, stomach, mammary gland, fetal kidney, fetal lung, tongue, and 6-week embryo cells (SEQ ID NOS:237-240); human fetal brain, brain, pituitary, cerebellum, spinal cord, thymus, lymph, node, bone marrow, trachea, kidney, fetal liver, prostate, testis, thyroid, adrenal gland, stomach, uterus, placenta, bladder, cervix, hypothalamus, fetal kidney, fetal lung, 6- and 12-week embryo, osteosarcoma, and embryonic carcinoma cells (SEQ ID NOS:241-244); human pituitary, lymph node, ovary and fetal kidney cells (SEQ ID NOS:245-247); human fetal brain, spinal cord, thymus, lymph node, bone marrow, trachea, lung, kidney, fetal liver, liver, prostate, testis, thyroid, pancreas, salivary gland, stomach, small intestine, colon, skeletal muscle, heart, uterus, placenta, mammary gland, adipose, skin, esophagus, bladder, cervix, rectum, fetal kidney, fetal lung, gall bladder, tongue, 6-, 9-, and 12-week old embryo, and osteosarcoma cells (SEQ ID NOS:248-257); human fetal brain, spinal cord, lymph node, bone marrow, adrenal gland, fetal kidney, and fetal lung cells (SEQ ID NOS:258 and 259); human brain, pituitary, cerebellum, spinal cord, lymph node, testis, adrenal gland, uterus, mammary gland, rectum, hypothalamus, ovary, fetal kidney, fetal lung, aorta, 6-, 9-, and 12-week old embryo, adenocarcinoma, osteosarcoma, embryonic carcinoma, and normal umbilical vein cells (SEQ ID NOS:260-265); human fetal brain, lymph node, trachea, kidney, testis, fetal kidney, fetal lung, and 6-week old embryo cells (SEQ ID NOS:266 and 267); human fetal brain, brain, pituitary, cerebellum, spinal cord, thymus, spleen, lymph node, trachea, lung, kidney, fetal liver, prostate, testis, thyroid, adrenal gland, pancreas, salivary gland, stomach, colon, skeletal muscle, heart, uterus, placenta, mammary gland, skin, esophagus, bladder, cervix, rectum, pericardium, hypothalamus, ovary, fetal kidney, fetal lung, gall bladder, tongue, aorta, 6-, 9-, and 12-week old embryo, adenocarcinoma, osteosarcoma, embryonic carcinoma, umbilical vein, microvascular endothelial, bone marrow and adipose cells (SEQ ID NOS:268-271); human fetal brain, brain, lung, pituitary, kidney, lymph node, testis, thyroid, adrenal gland, fetal kidney, fetal lung and osteosarcoma cells (SEQ ID NOS:272-276); and human lymph node, bone marrow, esophagus, fetal kidney, fetal lung, tongue, adenocarcinoma, and osteocarcinoma cells (SEQ ID NOS:277-279).

[0013] The described sequences were compiled from: gene trapped cDNAs and sequences isolated from a human testis cDNA library (SEQ ID NOS:1-13); gene trapped cDNAs, ESTS, and sequences isolated from a human brain cDNA library (SEQ ID NOS:14-15); gene trapped cDNAs, ESTs, and sequences isolated from a human thymus cDNA library (SEQ ID NOS:16-20); gene trapped cDNAs, ESTs, and sequences isolated from human prostate and testis cDNA libraries (SEQ ID NOS:21-23); gene trapped sequences in conjunction with sequences available in GenBank (SEQ ID NOS:24-29 and 73); gene trapped sequences in conjunction with sequences available in GenBank, and sequences isolated from lung and testis cDNAs libraries (SEQ ID NOS:30-72); gene trapped sequences in conjunction with sequences available in GenBank, and sequences isolated from adrenal gland, skeletal muscle, thymus, and testis cDNA libraries (SEQ ID NOS:74-78); human genomic sequence and sequences isolated from human trachea and testis cDNA libraries (SEQ ID NOS:79-81); gene trapped sequences in conjunction with sequences available in GenBank, and sequences isolated from testis, brain, and kidney cDNA libraries (SEQ ID NOS:82-90); gene trapped sequences in conjunction with sequences available in GenBank, and sequences isolated from a brain cDNA library (SEQ ID NOS:91-154); gene trapped sequences in conjunction with sequences available in GenBank, and sequences isolated from a kidney cDNA library (SEQ ID NOS:155-159); sequences available in GenBank, and sequences isolated from kidney, prostate, and colon cDNA libraries (SEQ ID NOS:160-165); human gene trapped products, sequences available in GenBank, and sequences isolated from kidney, testis, trachea, esophagus, and pituitary cDNA libraries (SEQ ID NOS:166-170), sequences available in GenBank, and sequences isolated from bone marrow and skeletal muscle cDNA libraries (SEQ ID NOS:171-175); sequences available in GenBank, and sequences isolated from skeletal muscle, adipose, pituitary, cerebellum, and brain cDNA libraries (SEQ ID NOS:176-179); sequences available in GenBank, and sequences isolated from prostate and testis cDNA libraries (SEQ ID NOS:180-184); sequences available in GenBank, and sequences isolated from pituitary, lymph node, mammary gland, brain, adrenal gland, fetus, and testis cDNA libraries (SEQ ID NOS:185-189); human genomic sequence and sequences isolated from human brain, lymph node, liver, cerebellum, kidney, testis, and bone marrow cDNA libraries (SEQ ID NOS:190-192); sequences available in GenBank, and sequences isolated from human brain and cerebellum cDNA libraries identified using primers generated from human genomic DNA (SEQ ID NOS:193-232); sequences available in GenBank (Accession Number AC016922), and sequences isolated from human fetal kidney, testis, and lymph node cDNA libraries identified using primers generated from human genomic DNA (SEQ ID NOS:233-236); clustered genomic sequence, ESTs, and sequences isolated from activated T-cell, thymus, and lymph node cDNA libraries (SEQ ID NOS:237-240); sequences isolated from pituitary, lymph node, germ cell tumor, retinal blastoma, glioblastoma, and papillary carcinoma cDNA libraries (SEQ ID NOS:245-247); sequences available in GenBank, and sequences isolated from a human kidney cDNA library (SEQ ID NOS:248-257); sequences available in GenBank, and sequences isolated from fetal kidney, spleen, and spinal cord cDNA libraries (SEQ ID NOS:258 and 259); sequences available in GenBank, and sequences isolated from human adult and fetal brain, pituitary, hypothalamus, testis, and fetus cDNA libraries identified using primers generated from human genomic DNA (SEQ ID NOS:260-265); human genomic sequence, and sequences isolated from human testis, kidney, lymph node, trachea, and fetal brain cDNA libraries (SEQ ID NOS:266 and 267); sequences available in GenBank, and sequences isolated from a human mammary gland cDNA library identified using primers generated from human genomic DNA (SEQ ID NOS:268-271); sequences available in GenBank, and sequences isolated from human lymph node, brain, fetal brain, thyroid, and testis cDNA libraries identified using primers generated from human genomic DNA (SEQ ID NOS:272-276); and human genomic sequence, and sequences isolated from human fetal lung, fetal kidney, esophagus, and lymph node cDNA libraries (SEQ ID NOS:277-279). The cDNA libraries were purchased from Clontech (Palo Alto, Calif.) and/or Edge Biosystems (Gaithersburg, Md.).

[0014] The present invention encompasses the nucleotides presented in the Sequence Listing, host cells expressing such nucleotides, the expression products of such nucleotides, and: (a) nucleotides that encode mammalian homologs of the described nucleotides, including the specifically described NHPs, and the NHP products; (b) nucleotides that encode one or more portions of a NHP that correspond to functional domains, and the polypeptide products specified by such nucleotide sequences, including, but not limited to, the novel regions of any active domain(s); (c) isolated nucleotides that encode mutant versions, engineered or naturally occurring, of the described NHPs, in which all or a part of at least one domain is deleted or altered, and the polypeptide products specified by such nucleotide sequences, including, but not limited to, soluble proteins and peptides; (d) nucleotides that encode chimeric fusion proteins containing all or a portion of a coding region of a NHP, or one of its domains (e.g., a receptor/ligand binding domain, accessory protein/self-association domain, etc.) fused to another peptide or polypeptide; or (e) therapeutic or diagnostic derivatives of the described polynucleotides, such as oligonucleotides, antisense polynucleotides, ribozymes, dsRNA, or gene therapy constructs, comprising a sequence first disclosed in the Sequence Listing.

[0015] As discussed above, the present invention includes the human DNA sequences presented in the Sequence Listing (and vectors comprising the same), and additionally contemplates any nucleotide sequence encoding a contiguous NHP open reading frame (ORF) that hybridizes to a complement of a DNA sequence presented in the Sequence Listing under highly stringent conditions, e.g., hybridization to filter-bound DNA in 0.5 M NaHPO₄, 7% sodium dodecyl sulfate (SDS), 1 mM EDTA at 65° C., and washing in 0.1×SSC/0.1% SDS at 68° C. (“Current Protocols in Molecular Biology”, Vol. 1, p. 2.10.3 (Ausubel et al., eds., Green Publishing Associates, Inc., and John Wiley & Sons, Inc., New York, 1989)) and encodes a functionally equivalent expression product. Additionally contemplated are any nucleotide sequences that hybridize to the complement of a DNA sequence that encodes and expresses an amino acid sequence presented in the Sequence Listing under moderately stringent conditions, e.g., washing in 0.2×SSC/0.1% SDS at 42° C. (“Current Protocols in Molecular Biology”, supra), yet still encode a functionally equivalent NHP product. Functional equivalents of a NHP include naturally occurring NHPs present in other species, and mutant NHPs, whether naturally occurring or engineered (by site directed mutagenesis, gene shuffling, or directed evolution). The invention also includes degenerate nucleic acid variants of the disclosed NHP polynucleotide sequences.

[0016] Additionally contemplated are polynucleotides encoding NHP ORFs, or their functional equivalents, encoded by polynucleotide sequences that are about 99, 95, 90, or about 85 percent similar to corresponding regions of SEQ ID NOS:1-279 (as measured by BLAST sequence comparison analysis using, for example, the GCG sequence analysis package (the University of Wisconsin GCG sequence analysis package, SEQUENCHER 3.0, Gene Codes Corp., Ann Arbor, Mich.) using default parameters).

[0017] The invention also includes nucleic acid molecules, preferably DNA molecules, that hybridize to, and are therefore the complements of, the described NHP-encoding polynucleotides. Such hybridization conditions can be highly stringent or less highly stringent, as described herein. In instances where the nucleic acid molecules are deoxyoligonucleotides (“DNA oligos”), such molecules are generally about 16 to about 100 bases long, or about 20 to about 80 bases long, or about 34 to about 45 bases long, or any variation or combination of sizes represented therein that incorporate a contiguous region of sequence first disclosed in the Sequence Listing. Such oligonucleotides can be used in conjunction with the polymerase chain reaction (PCR) to screen libraries, isolate clones, and prepare cloning and sequencing templates, etc.

[0018] Alternatively, such NHP oligonucleotides can be used as hybridization probes for screening libraries, and assessing gene expression patterns (particularly using a microarray or high-throughput “chip” format). Additionally, a series of NHP oligonucleotide sequences, or the complements thereof, can be used to represent all or a portion of the described NHP sequences. An oligonucleotide or polynucleotide sequence first disclosed in at least a portion of one or more of the nucleic acid sequences of SEQ ID NOS:1-279 can be used as a hybridization probe in conjunction with a solid support matrix/substrate (resins, beads, membranes, plastics, polymers, metal or metallized substrates, crystalline or polycrystalline substrates, etc.). Of particular note are spatially addressable arrays (i.e., gene chips, microtiter plates, etc.) of oligonucleotides and polynucleotides, or corresponding oligopeptides and polypeptides, wherein at least one of the biopolymers present on the spatially addressable array comprises an oligonucleotide or polynucleotide sequence first disclosed in at least one of the nucleic acid sequences of SEQ ID NOS:1-279, or an amino acid sequence encoded thereby. Methods for attaching biopolymers to, or synthesizing biopolymers on, solid support matrices, and conducting binding studies thereon, are disclosed in, inter alia, U.S. Pat. Nos. 5,700,637, 5,556,752, 5,744,305, 4,631,211, 5,445,934, 5,252,743, 4,713,326, 5,424,186, and 4,689,405.

[0019] Addressable arrays comprising sequences first disclosed in SEQ ID NOS:1-279 can be used to identify and characterize the temporal and tissue specific expression of a gene. These addressable arrays incorporate oligonucleotide sequences of sufficient length to confer the required specificity, yet be within the limitations of the production technology. The length of these probes is usually within a range of between about 8 to about 2000 nucleotides. Preferably the probes consist of 60 nucleotides, and more preferably 25 nucleotides, from the nucleic acid sequences first disclosed in SEQ ID NOS:1-279.

[0020] For example, a series of NHP oligonucleotide sequences, or the complements thereof, can be used in chip format to represent all or a portion of the described sequences. The oligonucleotides, typically between about 16 to about 40 (or any whole number within the stated range) nucleotides in length, can partially overlap each other, and/or the sequence may be represented using oligonucleotides that do not overlap. Accordingly, the described polynucleotide sequences shall typically comprise at least about two or three distinct oligonucleotide sequences of at least about 8 nucleotides in length that are each first disclosed in the described Sequence Listing. Such oligonucleotide sequences can begin at any nucleotide present within a sequence in the Sequence Listing, and proceed in either a sense (5′-to-3′) orientation vis-a-vis the described sequence or in an antisense (3′-to-5′) orientation.

[0021] Microarray-based analysis allows the discovery of broad patterns of genetic activity, providing new understanding of gene functions, and generating novel and unexpected insight into transcriptional processes and biological mechanisms. The use of addressable arrays comprising sequences first disclosed in SEQ ID NOS:1-279 provides detailed information about transcriptional changes involved in a specific pathway, potentially leading to the identification of novel components, or gene functions that manifest themselves as novel phenotypes.

[0022] Probes consisting of sequences first disclosed in SEQ ID NOS:1-279 can also be used in the identification, selection, and validation of novel molecular targets for drug discovery. The use of these unique sequences permits the direct confirmation of drug targets, and recognition of drug dependent changes in gene expression that are modulated through pathways distinct from the intended target of the drug. These unique sequences therefore also have utility in defining and monitoring both drug action and toxicity.

[0023] As an example of utility, the sequences first disclosed in SEQ ID NOS:1-279 can be utilized in microarrays, or other assay formats, to screen collections of genetic material from patients who have a particular medical condition. These investigations can also be carried out using the sequences first disclosed in SEQ ID NOS:1-279 in silico, and by comparing previously collected genetic databases and the disclosed sequences using computer software known to those in the art. Thus the sequences first disclosed in SEQ ID NOS:1-279 can be used to identify mutations associated with a particular disease, and also in diagnostic or prognostic assays.

[0024] Although the presently described sequences have been specifically described using nucleotide sequence, it should be appreciated that each of the sequences can uniquely be described using any of a wide variety of additional structural attributes, or combinations thereof. For example, a given nucleic acid sequence can be described by the net composition of the nucleotides present within a given region of the sequence, in conjunction with the presence of one or more specific oligonucleotide sequence(s) first disclosed in SEQ ID NOS:1-279. Alternatively, a restriction map specifying the relative positions of restriction endonuclease digestion sites, or various palindromic or other specific oligonucleotide sequences, can be used to structurally describe a given sequence. Such restriction maps, which are typically generated by widely available computer programs (e.g., the University of Wisconsin GCG sequence analysis package, SEQUENCHER 3.0, Gene Codes Corp., etc.), can optionally be used in conjunction with one or more discrete nucleotide sequence(s) present in the sequence that can be described by the relative position of the sequence relative to one or more additional sequence(s) or one or more restriction sites present in the disclosed sequence.

[0025] For oligonucleotide probes, highly stringent conditions may refer, e.g., to washing in 6×SSC/0.05% sodium pyrophosphate at 37° C. (for 14-base oligonucleotides), 48° C. (for 17-base oligonucleotides), 55° C. (for 20-base oligonucleotides), and 60° C. (for 23-base oligonucleotides). These nucleic acid molecules may encode or act as NHP antisense molecules, useful, for example, in NHP gene regulation and/or as antisense primers in amplification reactions of NHP nucleic acid sequences. With respect to NHP gene regulation, such techniques can be used to regulate biological functions. Further, such sequences can be used as part of ribozyme and/or triple helix sequences that are also useful for NHP gene regulation.

[0026] Inhibitory antisense or double stranded oligonucleotides can additionally comprise at least one modified base moiety that is selected from the group including, but not limited to, 5-fluorouracil, 5-bromouracil, 5-chlorouracil, 5-iodouracil, hypoxanthine, xanthine, 4-acetylcytosine, 5-(carboxyhydroxylmethyl) uracil, 5-carboxymethylaminomethyl-2-thiouridine, 5-carboxymethylaminomethyluracil, dihydrouracil, beta-D-galactosylqueosine, inosine, N6-isopentenyladenine, 1-methylguanine, 1-methylinosine, 2,2-dimethylguanine, 2-methyladenine, 2-methylguanine, 3-methylcytosine, 5-methylcytosine, N6-adenine, 7-methylguanine, 5-methylaminomethyluracil, 5-methoxyaminomethyl-2-thiouracil, beta-D-mannosylqueosine, 5′-methoxycarboxymethyluracil, 5-methoxyuracil, 2-methylthio-N6-isopentenyladenine, uracil-5-oxyacetic acid (v), wybutoxosine, pseudouracil, queosine, 2-thiocytosine, 5-methyl-2-thiouracil, 2-thiouracil, 4-thiouracil, 5-methyluracil, uracil-5-oxyacetic acid methylester, 3-(3-amino-3-N-2-carboxypropyl) uracil, (acp3)w, and 2,6-diaminopurine.

[0027] The antisense oligonucleotide can also comprise at least one modified sugar moiety selected from the group including, but not limited to, arabinose, 2-fluoroarabinose, xylulose, and hexose.

[0028] In yet another embodiment, the antisense oligonucleotide will comprise at least one modified phosphate backbone selected from the group including, but not limited to, a phosphorothioate, a phosphorodithioate, a phosphoramidothioate, a phosphoramidate, a phosphordiamidate, a methylphosphonate, an alkyl phosphotriester, and a formacetal or analog thereof.

[0029] In yet another embodiment, the antisense oligonucleotide is an α-anomeric oligonucleotide. An α-anomeric oligonucleotide forms specific double-stranded hybrids with complementary RNA in which, contrary to the usual β-units, the strands run parallel to each other (Gautier et al., Nucl. Acids Res. 15:6625-6641, 1987). The oligonucleotide is a 2′-O-methylribonucleotide (Inoue et al., Nucl. Acids Res. 15:6131-6148, 1987), or a chimeric RNA-DNA analogue (Inoue et al., FEBS Lett. 215:327-330, 1987). Alternatively, double stranded RNA can be used to disrupt the expression and function of a targeted NHP.

[0030] Oligonucleotides of the invention can be synthesized by standard methods known in the art, e.g., by use of an automated DNA synthesizer (such as are commercially available from Biosearch, Applied Biosystems, etc.). As examples, phosphorothioate oligonucleotides can be synthesized by the method of Stein et al. (Nucl. Acids Res. 16:3209-3221, 1988), and methylphosphonate oligonucleotides can be prepared by use of controlled pore glass polymer supports (Sarin et al., Proc. Natl. Acad. Sci. USA 85:7448-7451, 1988), etc.

[0031] Low stringency conditions are well-known to those of skill in the art, and will vary predictably depending on the specific organisms from which the library and the labeled sequences are derived. For guidance regarding such conditions, see, for example, “Molecular Cloning, A Laboratory Manual” (Sambrook et al., eds., Cold Spring Harbor Press, Cold Spring Harbor, N.Y., 1989), “Current Protocols in Molecular Biology”, supra, and periodic updates thereof.

[0032] Alternatively, suitably labeled NHP nucleotide probes can be used to screen a human genomic library using appropriately stringent conditions or by PCR. The identification and characterization of human genomic clones is helpful for identifying polymorphisms (including, but not limited to, nucleotide repeats, microsatellite alleles, single nucleotide polymorphisms, or coding single nucleotide polymorphisms), determining the genomic structure of a given locus/allele, and designing diagnostic tests. For example, sequences derived from regions adjacent to the intron/exon boundaries of the human gene can be used to design primers for use in amplification assays to detect mutations within the exons, introns, splice sites (e.g., splice acceptor and/or donor sites), etc., that can be used in diagnostics and pharmacogenomics.

[0033] For example, the present sequences can be used in restriction fragment length polymorphism (RFLP) analysis to identify specific individuals. In this technique, an individual's genomic DNA is digested with one or more restriction enzymes, and probed on a Southern blot to yield unique bands for identification (as generally described in U.S. Pat. No. 5,272,057). In addition, the sequences of the present invention can be used to provide polynucleotide reagents, e.g., PCR primers, targeted to specific loci in the human genome, which can enhance the reliability of DNA-based forensic identifications by, for example, providing another “identification marker” (i.e., another DNA sequence that is unique to a particular individual). Actual base sequence information can be used for identification as an accurate alternative to patterns formed by restriction enzyme generated fragments.

[0034] Further, a NHP gene homolog can be isolated from nucleic acid from an organism of interest by performing PCR using two degenerate or “wobble” oligonucleotide primer pools designed on the basis of amino acid sequences within the NHP products disclosed herein. The template for the reaction may be total RNA, mRNA, genomic DNA and/or cDNA obtained by reverse transcription of mRNA prepared from, for example, human or non-human cell lines or tissue known to express, or suspected of expressing, an allele of a NHP gene.

[0035] The PCR product can be subcloned and sequenced to ensure that the amplified sequences represent the sequence of the desired NHP gene. The PCR fragment can then be used to isolate a full length cDNA clone by a variety of methods. For example, the amplified fragment can be labeled and used to screen a cDNA library, such as a bacteriophage cDNA library. Alternatively, the labeled fragment can be used to isolate genomic clones via the screening of a genomic library.

[0036] PCR technology can also be used to isolate full length cDNA sequences. For example, RNA can be isolated, following standard procedures, from an appropriate cellular or tissue source (i.e., one known to express, or suspected of expressing, a NHP gene). A reverse transcription (RT) reaction can be performed on the RNA using an oligonucleotide primer specific for the most 5′ end of the amplified fragment for the priming of first strand synthesis. The resulting RNA/DNA hybrid may then be “tailed” using a standard terminal transferase reaction, the hybrid may be digested with RNase H, and second strand synthesis may then be primed with a complementary primer. Thus, cDNA sequences upstream of the amplified fragment can be isolated. For a review of cloning strategies that can be used, see, e.g., “Molecular Cloning, A Laboratory Manual”, supra.

[0037] A cDNA encoding a mutant NHP sequence can be isolated, for example, by using PCR. In this case, the first cDNA strand may be synthesized by hybridizing an oligo-dT oligonucleotide to mRNA isolated from tissue known to express, or suspected of expressing, a NHP, in an individual putatively carrying a mutant NHP allele, and by extending the new strand with reverse transcriptase. The second strand of the cDNA is then synthesized using an oligonucleotide that hybridizes specifically to the 5′ end of the normal sequence. Using these two primers, the product is then amplified via PCR, optionally cloned into a suitable vector, and subjected to DNA sequence analysis through methods well-known to those of skill in the art. By comparing the DNA sequence of the mutant NHP allele to that of a corresponding normal NHP allele, the mutation(s) responsible for the loss or alteration of function of the mutant NHP gene product can be ascertained.

[0038] Alternatively, a genomic library can be constructed using DNA obtained from an individual suspected of carrying, or known to carry, a mutant NHP allele (e.g., a person manifesting a NHP-associated phenotype such as, for example, behavioral disorders, immune disorders, osteoporosis, obesity, high blood pressure, connective tissue disorders, infertility, etc.), or a cDNA library can be constructed using RNA from a tissue known to express, or suspected of expressing, a mutant NHP allele. A normal NHP gene, or any suitable fragment thereof, can then be labeled and used as a probe to identify the corresponding mutant NHP allele in such libraries. Clones containing mutant NHP sequences can then be purified and subjected to sequence analysis according to methods well-known to those skilled in the art.

[0039] Additionally, an expression library can be constructed utilizing cDNA synthesized from, for example, RNA isolated from a tissue known to express, or suspected of expressing, a mutant NHP allele in an individual suspected of carrying, or known to carry, such a mutant allele. In this manner, gene products made by the putatively mutant tissue may be expressed and screened using standard antibody screening techniques in conjunction with antibodies raised against a normal NHP product, as described below (for screening techniques, see, for example, “Antibodies: A Laboratory Manual” (Harlow and Lane, eds., Cold Spring Harbor Press, Cold Spring Harbor, N.Y., 1988)).

[0040] Additionally, screening can be accomplished by screening with labeled NHP fusion proteins, such as, for example, alkaline phosphatase-NHP or NHP-alkaline phosphatase fusion proteins. In cases where a NHP mutation results in an expression product with altered function (e.g., as a result of a missense or a frameshift mutation), polyclonal antibodies to a NHP are likely to cross-react with a corresponding mutant NHP expression product. Library clones detected via their reaction with such labeled antibodies can be purified and subjected to sequence analysis according to methods well-known in the art.

[0041] An additional application of the described novel human polynucleotide sequences is their use in the molecular mutagenesis/evolution of proteins that are at least partially encoded by the described novel sequences using, for example, polynucleotide shuffling or related methodologies. Such approaches are described in U.S. Pat. Nos. 5,830,721, 5,837,458, 6,117,679, and 5,723,323.

[0042] The invention also encompasses: (a) DNA vectors that contain any of the foregoing NHP coding sequences and/or their complements (i.e., antisense); (b) DNA expression vectors that contain any of the foregoing NHP coding sequences operatively associated with a regulatory element that directs the expression of the coding sequences (for example, baculovirus as described in U.S. Pat. No. 5,869,336); (c) genetically engineered host cells that contain any of the foregoing NHP coding sequences operatively associated with a regulatory element that directs the expression of the coding sequences in the host cell; and (d) genetically engineered host cells that express an endogenous NHP sequence under the control of an exogenously introduced regulatory element (i.e., gene activation). As used herein, regulatory elements include, but are not limited to, inducible and non-inducible promoters, enhancers, operators, and other elements known to those skilled in the art that drive and regulate expression. Such regulatory elements include, but are not limited to, the cytomegalovirus (hCMV) immediate early gene, regulatable, viral elements (particularly retroviral LTR promoters), the early or late promoters of SV40 or adenovirus, the lac system, the trp system, the TAC system, the TRC system, the major operator and promoter regions of phage lambda, the control regions of fd coat protein, the promoter for 3-phosphoglycerate kinase (PGK), the promoters of acid phosphatase, and the promoters of the yeast α-mating factors.

[0043] Where, as in the present instance, some of the described NHP peptides or polypeptides are thought to be cytoplasmic or nuclear proteins (although processed forms or fragments can be secreted or membrane associated), expression systems can be engineered that produce soluble derivatives of a NHP (corresponding to a NHP extracellular and/or intracellular domains, or truncated polypeptides lacking one or more hydrophobic domains) and/or NHP fusion protein products (especially NHP-Ig fusion proteins, i.e., fusions of a NHP domain to an IgFc), NHP antibodies, and anti-idiotypic antibodies (including Fab fragments) that can be used in therapeutic applications. Preferably, the above expression systems are engineered to allow the desired peptide or polypeptide to be recovered from the culture media.

[0044] The present invention also encompasses antibodies and anti-idiotypic antibodies (including Fab fragments), antagonists and agonists of a NHP, as well as compounds or nucleotide constructs that inhibit expression of a NHP sequence (transcription factor inhibitors, antisense and ribozyme molecules, or open reading frame sequence or regulatory sequence replacement constructs), or promote the expression of a NHP (e.g., expression constructs in which NHP coding sequences are operatively associated with expression control elements such as promoters, promoter/enhancers, etc.).

[0045] The NHPs or NHP peptides, NHP fusion proteins, NHP nucleotide sequences, antibodies, antagonists and agonists can be useful for the detection of mutant NHPs, or inappropriately expressed NHPs, for the diagnosis of disease. The NHP proteins or peptides, NHP fusion proteins, NHP nucleotide sequences, host cell expression systems, antibodies, antagonists, agonists and genetically engineered cells and animals can be used for screening for drugs (or high throughput screening of combinatorial libraries) effective in the treatment of the symptomatic or phenotypic manifestations of perturbing the normal function of a NHP in the body. The use of engineered host cells and/or animals can offer an advantage in that such systems allow not only for the identification of compounds that bind to the endogenous receptor/ligand of a NHP, but can also identify compounds that trigger NHP-mediated activities or pathways.

[0046] Finally, the NHP products can be used as therapeutics. For example, soluble derivatives such as NHP peptides/domains corresponding to NHPs, NHP fusion protein products (especially NHP-Ig fusion proteins, i.e., fusions of a NHP, or a domain of a NHP, to an IgFc), NHP antibodies and anti-idiotypic antibodies (including Fab fragments), antagonists or agonists (including compounds that modulate or act on downstream targets in a NHP-mediated pathway) can be used to directly treat diseases or disorders. For instance, the administration of an effective amount of a soluble NHP, a NHP-IgFc fusion protein, or an anti-idiotypic antibody (or its Fab) that mimics the NHP, could activate or effectively antagonize the endogenous NHP or a protein interactive therewith. Nucleotide constructs encoding such NHP products can be used to genetically engineer host cells to express such products in vivo; these genetically engineered cells function as “bioreactors” in the body delivering a continuous supply of a NHP, a NHP peptide, or a NHP fusion protein to the body. Nucleotide constructs encoding functional NHPs, mutant NHPs, as well as antisense and ribozyme molecules, can also be used in “gene therapy” approaches for the modulation of NHP expression. Thus, the invention also encompasses pharmaceutical formulations and methods for treating biological disorders.

[0047] Various aspects of the invention are described in greater detail in the subsections below.

### 7.1 The NHP Sequences

[0048] The cDNA sequences and corresponding deduced amino acid sequences of the described NHPs (SEQ ID NOS:1-279) are presented in the Sequence Listing.

[0049] A number of polymorphisms were identified during the sequencing of the disclosed nucleic acid sequences, including: an A/G polymorphism (denoted by “r” in the Sequence Listing) in the 3′ UTR of SEQ ID NO:13 (which includes a complete NHP ORF flanked by 5′ and 3′ sequences); an A/G polymorphism at nucleotide (nt) position 739 of SEQ ID NOS:30, 34, 40, 44, 52, 60 and 68, and nt position 67 of SEQ ID NOS:32, 36, 46, 54, 62 and 70, which can result in an isoleucine or valine residue at corresponding amino acid (aa) position number 247 of SEQ ID NOS:31, 35, 41, 45, 53, 61 and 69, and aa position number 23 of SEQ ID NOS:33, 37, 47, 55, 63 and 71; a silent C/T polymorphism (denoted by “y” in the Sequence Listing) at nt position 24 of SEQ ID NO:74, both of which result in an aspartate residue at corresponding aa position 8 of SEQ ID NO:75; a silent C/G polymorphism at nt position 9 of SEQ ID NOS:82, 84, 86 and 88, both of which result in an alanine residue at corresponding aa position 3 of SEQ ID NOS:83, 85, 87 and 89; an A/T polymorphism (denoted by “w” in the Sequence Listing) at nt position 2929 of SEQ ID NOS:91, 93, and 95, nt position 2470 of SEQ ID NOS:97, 99, and 101, nt position 2845 of SEQ ID NOS:107, 109, and 111, nt position 2386 of SEQ ID NOS:113, 115, and 117, nt position 2749 of SEQ ID NOS:123, 125, and 127, nt position 2290 of SEQ ID NOS:129, 131, and 133, nt position 2665 of SEQ ID NOS:139, 141, and 143, and nt position 2206 of SEQ ID NOS:145, 147, and 149, which can result in a serine or threonine residue at corresponding aa position 977 of SEQ ID NOS:92, 94, and 96, aa position 824 of SEQ ID NOS:98, 100, and 102, aa position 949 of SEQ ID NOS:108, 110, and 112, aa position 796 of SEQ ID NOS:114, 116, and 118, aa position 917 of SEQ ID NOS:124, 126, and 128, aa position 764 of SEQ ID NOS:130, 132, and 134, aa position 889 of SEQ ID NOS:140, 142, and 144, and aa position 736 of SEQ ID NOS:146, 148, and 150, respectively; a G/T polymorphism (denoted by “k” in the Sequence Listing) at nt position 5424 of SEQ ID NOS:91 and 93, nt position 4965 of SEQ ID NOS:97 and 99, nt position 4686 of SEQ ID NOS:103 and 105, nt position 5340 of SEQ ID NOS:107 and 109, nt position 4881 of SEQ ID NOS:113 and 115, nt position 4602 of SEQ ID NOS:119 and 121, nt position 5244 of SEQ ID NOS:123 and 125, nt position 4785 of SEQ ID NOS:129 and 131, nt position 4506 of SEQ ID NOS:135 and 137, nt position 5160 of SEQ ID NOS:139 and 141, nt position 4701 of SEQ ID NOS:145 and 147, and nt position 4422 of SEQ ID NOS:151 and 153, which can result in a methionine or isoleucine residue at corresponding aa position 1808 of SEQ ID NOS:92 and 94, aa position 1655 of SEQ ID NOS:98 and 100, aa position 1562 of SEQ ID NOS:104 and 106, aa position 1780 of SEQ ID NOS:108 and 110, aa position 1627 of SEQ ID NOS:114 and 116, aa position 1534 of SEQ ID NOS:120 and 122, aa position 1748 of SEQ ID NOS:124 and 126, aa position 1595 of SEQ ID NOS:130 and 132, aa position 1502 of SEQ ID NOS:136 and 138, aa position 1720 of SEQ ID NOS:140 and 142, aa position 1567 of SEQ ID NOS:146 and 148, and aa position 1474 of SEQ ID NOS:152 and 154, respectively; a silent T/C polymorphism (denoted by “y” in the Sequence Listing) at nt position 3960 of SEQ ID NOS:91 and 93, nt position 3501 of SEQ ID NOS:97 and 99, nt position 3222 of SEQ ID NOS:103 and 105, nt position 3876 of SEQ ID NOS:107 and 109, nt position 3417 of SEQ ID NOS:113 and 115, nt position 3138 of SEQ ID NOS:119 and 121, nt position 3780 of SEQ ID NOS:123 and 125, nt position 3321 of SEQ ID NOS:129 and 131, nt position 3042 of SEQ ID NOS:135 and 137, nt position 3696 of SEQ ID NOS:139 and 141, nt position 3237 of SEQ ID NOS:145 and 147, and nt position 2958 of SEQ ID NOS:151 and 153, both of which lead to an asparagine residue at corresponding aa position 1320 of SEQ ID NOS:92 and 94, aa position 1167 of SEQ ID NOS:98 and 100, aa position 1074 of SEQ ID NOS:104 and 106, aa position 1292 of SEQ ID NOS:108 and 110, aa position 1139 of SEQ ID NOS:114 and 116, aa position 1046 of SEQ ID NOS:120 and 122, aa position 1260 of SEQ ID NOS:124 and 126, aa position 1107 of SEQ ID NOS:130 and 132, aa position 1014 of SEQ ID NOS:136 and 138, aa position 1232 of SEQ ID NOS:140 and 142, aa position 1079 of SEQ ID NOS:146 and 148, and aa position 986 of SEQ ID NOS:152 and 154, respectively; a silent C/T polymorphism (denoted by “y” in the Sequence Listing) at nt position 309 of SEQ ID NOS:155 and 157, both of which result in a threonine residue at corresponding aa position 103 of SEQ ID NOS:156 and 158; an A/G polymorphism (denoted by “r” in the Sequence Listing) at nt position 889 of SEQ ID NO:157, which can result in a lysine or glutamate residue at corresponding aa position 297 of SEQ ID NO:158; a silent C/T polymorphism (denoted by “y” in the Sequence Listing) at nt position 1188 of SEQ ID NO:157, both of which result in an asparagine residue at corresponding aa position 396 of SEQ ID NO:158; a silent A/G polymorphism (denoted by “r” in the Sequence Listing) at nt position 1317 of SEQ ID NO:157, both of which result in a glutamine residue at corresponding aa position 439 of SEQ ID NO:158; a silent C/T polymorphism (denoted by “y” in the Sequence Listing) at nt position 3121 of SEQ ID NO:157, both of which result in a leucine residue at corresponding aa position 1041 of SEQ ID NO:158; a C/T polymorphism (denoted by “y” in the Sequence Listing) at nt position 1043 of SEQ ID NOS:160 and 162, which can result in a serine or phenylalanine residue at corresponding aa position 348 of SEQ ID NOS:161 and 163; a silent T/C polymorphism (denoted by “y” in the Sequence Listing) at nt position 294 of SEQ ID NOS:176 and 178, both of which result in a serine residue at corresponding aa position 98 of SEQ ID NOS:177 and 179; a silent T/C polymorphism (denoted by “y” in the Sequence Listing) at nt position 1170 of SEQ ID NO:185, both of which result in a glycine residue at corresponding aa position 390 of SEQ ID NO:186; a silent T/C polymorphism (denoted by “y” in the Sequence Listing) at nt position 1321 of SEQ ID NO:185, both of which result a leucine residue at corresponding aa position 441 of SEQ ID NO:186; a C/G polymorphism at nt position 94 of SEQ ID NO:187, which can result in a leucine or valine residue at corresponding aa position 32 of SEQ ID NO:188; an A/G polymorphism at nt position 112 of SEQ ID NO:187, which can result in a lysine or glutamate residue at corresponding aa position 38 of SEQ ID NO:188; an A/T polymorphism at nt position 133 of SEQ ID NO:187, which can result in a threonine or serine residue at corresponding aa position 45 of SEQ ID NO:188; an A/G polymorphism (denoted by “r” in the Sequence Listing) at nt position 2182 of SEQ ID NO:190, which can result in a valine or isoleucine residue at corresponding aa position 728 of SEQ ID NO:191; a G/T polymorphism (denoted by “k” in the Sequence Listing) at nt position 2223 of SEQ ID NO:190, which can result in a glutamate or aspartate residue at corresponding aa position 741 of SEQ ID NO:191; a silent T/C polymorphism (denoted by “y” in the Sequence Listing) at nt position 2319 of SEQ ID NO:190, both of which result in a serine residue at corresponding aa position 773 of SEQ ID NO:191; a G/T polymorphism (denoted by “k” in the Sequence Listing) at nt position 2350 of SEQ ID NO:190, which can result in a glycine or cysteine residue at corresponding aa position 784 of SEQ ID NO:191; a silent A/G polymorphism (denoted by “r” in the Sequence Listing) at nt position 2161 of SEQ ID NO:190, both of which result in a proline residue at corresponding aa position 887 of SEQ ID NO:191; an A/C polymorphism (denoted by “m” in the Sequence Listing) at nt position 2765 of SEQ ID NO:190, which can result in an aspartate or alanine residue at corresponding aa position 922 of SEQ ID NO:191; a C/T polymorphism (denoted by “y” in the Sequence Listing) at nt position 2768 of SEQ ID NO:190, which can result in a leucine or proline residue at corresponding aa position 923 of SEQ ID NO:191; an A/T polymorphism (denoted by “w” in the Sequence Listing) at nt position 2773 of SEQ ID NO:190, which can result in a serine or cysteine residue at corresponding aa position 925 of SEQ ID NO:191; a C/G polymorphism (denoted by “s” in the Sequence Listing) at nt position 2186 of SEQ ID NOS:193 and 209, nt position 2168 of SEQ ID NOS:195 and 211, nt position 1868 of SEQ ID NOS:197 and 213, nt position 1829 of SEQ ID NOS:199 and 215, nt position 2447 of SEQ ID NOS:217 and 225, nt position 2429 of SEQ ID NOS:219 and 227, nt position 2129 of SEQ ID NOS:221 and 229, and nt position 2090 of SEQ ID NOS:223 and 231, which can result in a glycine or alanine residue at corresponding aa position 729 of SEQ ID NOS:194 and 210, aa position 723 of SEQ ID NOS:196 and 212, aa position 623 of SEQ ID NOS:198 and 214, aa position 610 of SEQ ID NOS:200 and 216, aa position 816 of SEQ ID NOS:218 and 226, aa position 810 of SEQ ID NOS:220 and 228, aa position 710 of SEQ ID NOS:222 and 230, and aa position 697 of SEQ ID NOS:224 and 232, respectively; a C/G polymorphism (denoted by “s” in the Sequence Listing) at nt position 1901 of SEQ ID NO:201, nt position 1883 of SEQ ID NO:203, nt position 1583 of SEQ ID NO:205, and nt position 1544 of SEQ ID NO:207, which can result in an arginine or threonine residue at corresponding aa position 634 of SEQ ID NO:202, aa position 628 of SEQ ID NO:204, aa position 528 of SEQ ID NO:206, and aa position 515 of SEQ ID NO:208, respectively; a silent C/T polymorphism (denoted by “y” in the Sequence Listing) at nt position 1857 of SEQ ID NOS:193 and 209, nt position 1839 of SEQ ID NOS:195 and 211, nt position 1539 of SEQ ID NOS:197 and 213, nt position 1500 of SEQ ID NOS:199 and 215, nt position 2118 of SEQ ID NOS:217 and 225, nt position 2100 of SEQ ID NOS:219 and 227, nt position 1800 of SEQ ID NOS:221 and 229, and nt position 1761 of SEQ ID NOS:223 and 231, both of which result in an aspartate residue at corresponding aa position 619 of SEQ ID NOS:194 and 210, aa position 613 of SEQ ID NOS:196 and 212, aa position 513 of SEQ ID NOS:198 and 214, aa position 500 of SEQ ID NOS:200 and 216, aa position 706 of SEQ ID NOS:218 and 226, aa position 700 of SEQ ID NOS:220 and 228, aa position 600 of SEQ ID NOS:222 and 230, and aa position 587 of SEQ ID NOS:224 and 232, respectively; a silent A/G polymorphism (denoted by “r” in the Sequence Listing) at nt position 1917 of SEQ ID NO:201, nt position 1899 of SEQ ID NO:203, nt position 1599 of SEQ ID NO:205, and nt position 1560 of SEQ ID NO:207, both of which result in a glutamate residue at corresponding aa position 639 of SEQ ID NO:202, aa position 633 of SEQ ID NO:204, aa position 533 of SEQ ID NO:206, and aa position 520 of SEQ ID NO:208, respectively; a C/G polymorphism at nt position 5218 of SEQ ID NOS:233 and 235, which can result in a leucine or valine residue at corresponding aa position 1740 of SEQ ID NOS:234 and 236; a C/G polymorphism at nt position 6065 of SEQ ID NO:233, which can result in an alanine or glycine residue at corresponding aa position 2022 of SEQ ID NO:234; a G/T polymorphism at nt position 111 of SEQ ID NO:237, which can result in a glutamine or histidine residue at corresponding aa position 37 of SEQ ID NO:238; a GC/CG polymorphism at nt positions 9 and 10 of SEQ ID NO:245, which can result in a proline-proline or proline-arginine dyad at corresponding aa positions 3 and 4 of SEQ ID NO:246; a C/T polymorphism at nt position 605 of SEQ ID NO:245, which can result in a serine or phenylalanine residue at corresponding aa position 202 of SEQ ID NO:246; a C/T polymorphism at nt position 637 of SEQ ID NO:245, which can result in a leucine or phenylalanine residue at corresponding aa position 213 of SEQ ID NO:246; a T/C polymorphism at nt position 1019 of SEQ ID NO:245, which can result in valine or alanine residue at corresponding aa position 340 of SEQ ID NO:246; a G/A polymorphism at nt position 1265 of SEQ ID NO:245, which can result in a serine or asparagine residue at corresponding aa position 422 of SEQ ID NO:246; a G/C polymorphism at nt position 1276 of SEQ ID NO:245, which can result in a glycine or arginine residue at corresponding aa position 426 of SEQ ID NO:246; a G/A polymorphism at nt position 1280 of SEQ ID NO:245, which can result in an arginine or glutamine residue at corresponding aa position 427 of SEQ ID NO:246; a C/A polymorphism at nt position 1709 of SEQ ID NO:245, which can result in an alanine or aspartate residue at corresponding aa position 570 of SEQ ID NO:246; a G/C polymorphism at nt position 1879 of SEQ ID NO:245, which can result in an alanine or proline residue at corresponding aa position 627 of SEQ ID NO:246; a silent A/G polymorphism at nt position 366 of SEQ ID NOS:248, 250, 252, and 254, both of which result in a glycine residue at corresponding aa position 122 of SEQ ID NOS:249, 251, 253, and 255; a G/T polymorphism at nt position 867 of SEQ ID NOS:248, 250, 252 (denoted by “k” in the Sequence Listing), and 254, which can result in a glutamine or histidine residue at corresponding aa position 289 of SEQ ID NOS:249, 251, 253, and 255; a C/G polymorphism at nt position 3686 of SEQ ID NOS:248, 252 (denoted by “s” in the Sequence Listing), and 254, and nt position 1826 of SEQ ID NO:256, which can result in a serine or tryptophan residue at corresponding aa position 1229 of SEQ ID NOS:249, 253, and 255, and aa position 609 of SEQ ID NO:257; a silent C/T polymorphism at nt position 3876 of SEQ ID NOS:248, 252, and 254, and nt position 2016 of SEQ ID NO:256, both of which result in a threonine residue at corresponding aa position 1292 of SEQ ID NOS:249, 253, and 255, and aa position 672 of SEQ ID NO:257; a silent A/G polymorphism at nt position 4800 of SEQ ID NOS:248, 252, and 254, and nt position 2940 of SEQ ID NO:256, both of which result in a glycine residue at corresponding aa position 1600 of SEQ ID NOS:249, 253, and 255, and aa position 980 of SEQ ID NO:257; a C/G polymorphism at nt position 5024 of SEQ ID NOS:248, 252, and 254, and nt position 3164 of SEQ ID NO:256, which can result in an alanine or glycine residue at corresponding aa position 1675 of SEQ ID NOS:249, 253, and 255, and aa position 1055 of SEQ ID NO:257; a silent T/G polymorphism at nt position 5091 of SEQ ID NOS:248, 252, and 254, and nt position 3231 of SEQ ID NO:256, both of which result in a glycine residue at corresponding aa position 1697 of SEQ ID NOS:249, 253, and 255, and aa position 1077 of SEQ ID NO:257; a silent C/T polymorphism at nt position 5896 of SEQ ID NOS:248, 252, and 254, and nt position 4036 of SEQ ID NO:256, both of which result in a leucine residue at corresponding aa position 1966 of SEQ ID NOS:249, 253, and 255, and aa position 1346 of SEQ ID NO:257; a silent C/T polymorphism at nt position 6777 of SEQ ID NOS:248 and 252, both of which result in a phenylalanine residue at corresponding aa position 2259 of SEQ ID NOS:249 and 253; a G/C polymorphism at nt position 427 of SEQ ID NO:258, which can result in an aspartate or histidine residue at corresponding aa position 144 of SEQ ID NO:259; a G/T polymorphism at nt position 79 of SEQ ID NO:266, which can result in an alanine or threonine residue at corresponding aa position 27 of SEQ ID NO:267; an A/G polymorphism at nt position 647 of SEQ ID NO:266, which can result in an aspartate or glycine residue at corresponding aa position 216 of SEQ ID NO:267; a silent G/A polymorphism at nt position 660 of SEQ ID NO:266, both of which result in a lysine residue at corresponding aa position 220 of SEQ ID NO:267; a silent C/T polymorphism at nt position 873 of SEQ ID NO:266, both of which result in a histidine residue at corresponding aa position 291 of SEQ ID NO:267; a G/C polymorphism at nt position 427 of SEQ ID NO:268, which can result in a glutamate or glutamine residue at corresponding aa position 143 of SEQ ID NO:269; a silent C/G polymorphism at nt position 483 of SEQ ID NO:268, both of which result in a valine residue at corresponding aa position 161 of SEQ ID NO:269; an A/G polymorphism at nt position 350 of SEQ ID NOS:272 or 274, which can result in an aspartate or glycine residue at corresponding aa position 117 of SEQ ID NOS:273 or 275; and a T/A polymorphism at nt position 1463 of SEQ ID NO:272, which can result in a valine or glutamate residue at corresponding aa position 488 of SEQ ID NO:273. The present invention contemplates sequences comprising any and all combinations and permutations of the above polymorphisms. Many of these polymorphisms are coding single nucleotide polymorphisms, and as such they are particularly useful in forensic analysis.

[0050] The genes encoding the described NHPs are apparently encoded on: human chromosome 16 (SEQ ID NOS:160-165); human chromosome 6, see GenBank Accession Number AL138876 (SEQ ID NOS:166-170); human chromosome 13, see GenBank Accession Number AL139082 (SEQ ID NOS:171-175); human chromosome 3, see GenBank Accession Number AC027483 (SEQ ID NOS:180-184); human chromosome 17, see GenBank Accession Number AC010761 (SEQ ID NOS:185-186); human chromosome 3, see GenBank Accession Number AC068979 (SEQ ID NOS:187-189); human chromosome 1, see GenBank Accession Number AL133380 (SEQ ID NOS:190-192); human chromosome 1 (SEQ ID NOS:190-192); human chromosome 6 (SEQ ID NOS:193-232); human chromosome 12 (SEQ ID NOS:233-236); human chromosome 3 and/or 2, see GenBank Accession Number AC084188 (SEQ ID NOS:237-240); a contiguous “exon” on human chromosome 9, see GenBank Accession Number AL353746 (SEQ ID NOS:241-244); human chromosome 11, see GenBank Accession Number AC018798 (SEQ ID NOS:245-247); human chromosome 6, see GenBank Accession Number AC010862 (SEQ ID NO:248-257); human chromosome 2, see GenBank Accession Number AC067825 (SEQ ID NOS:258 and 259); human chromosome 19, see GenBank Accession Number AC020922 (SEQ ID NOS:260-265); the human genomic locus defined in part by GenBank Accession Number AC023194 (SEQ ID NOS:266 and 267); human chromosome 9, see GenBank Accession Number AL161726 (SEQ ID NOS:268-271); human chromosome 3, see GenBank Accession Number AC010210 (SEQ ID NOS:272-276); and human chromosome 19, see GenBank Accession Number AC008735 (SEQ ID NOS:277-279). Accordingly, the described sequences are also useful for mapping and identifying the coding regions of the human genome, and for defining exon splice junctions.

[0051] Given the physiological importance of protein kinases, they have been subject to intense scrutiny, as exemplified and discussed in U.S. Pat. Nos. 5,532,151, 5,591,618, 5,756,289, 5,817,479, 6,001,593, and 6,340,583, which describe polynucleotides encoding similar kinase proteins, as well as a variety of uses and applications that are germane to the described NHPs.

[0052] NHP gene products can also be expressed in transgenic animals. Animals of any species, including, but not limited to, worms, mice, rats, rabbits, guinea pigs, pigs, micro-pigs, birds, goats, and non-human primates, e.g., baboons, monkeys, and chimpanzees, may be used to generate NHP transgenic animals.

[0053] Any technique known in the art may be used to introduce a NHP transgene into animals to produce the founder lines of transgenic animals. Such techniques include, but are not limited to, pronuclear microinjection (U.S. Pat. No. 4,873,191); retrovirus-mediated gene transfer into germ lines (Van der Putten et al., Proc. Natl. Acad. Sci. USA 82:6148-6152, 1985); gene targeting in embryonic stem cells (Thompson et al., Cell 56:313-321, 1989); electroporation of embryos (Lo, Mol. Cell. Biol. 3:1803-1814, 1983); and sperm-mediated gene transfer (Lavitrano et al., Cell 57:717-723, 1989); etc. For a review of such techniques, see, e.g., Gordon, Intl. Rev. Cytol. 115:171-229, 1989.

[0054] The present invention provides for transgenic animals that carry a NHP transgene in all their cells, as well as animals that carry a transgene in some, but not all their cells, i.e., mosaic animals or somatic cell transgenic animals. A transgene may be integrated as a single transgene, or in concatamers, e.g., head-to-head tandems or head-to-tail tandems. A transgene may also be selectively introduced into and activated in a particular cell-type by following, for example, the teaching of Lasko et al., Proc. Natl. Acad. Sci. USA 89:6232-6236, 1992. The regulatory sequences required for such a cell-type specific activation will depend upon the particular cell-type of interest, and will be apparent to those of skill in the art.

[0055] When it is desired that a NHP transgene be integrated into the chromosomal site of the endogenous NHP gene, gene targeting is preferred. Briefly, when such a technique is to be utilized, vectors containing some nucleotide sequences homologous to the endogenous NHP gene are designed for the purpose of integrating, via homologous recombination with chromosomal sequences, into and disrupting the function of the nucleotide sequence of the endogenous NHP gene (i.e., “knockout” animals).

[0056] The transgene can also be selectively introduced into a particular cell-type, thus inactivating the endogenous NHP gene in only that cell-type, by following, for example, the teaching of Gu et al., Science 265:103-106, 1994. The regulatory sequences required for such a cell-type specific inactivation will depend upon the particular cell-type of interest, and will be apparent to those of skill in the art.

[0057] Once transgenic animals have been generated, the expression of the recombinant NHP gene may be assayed utilizing standard techniques. Initial screening may be accomplished by Southern blot analysis or PCR techniques to analyze animal tissues to assay whether integration of the transgene has taken place. The level of mRNA expression of the transgene in the tissues of the transgenic animals may also be assessed using techniques that include, but are not limited to, Northern blot analysis of tissue samples obtained from the animal, in situ hybridization analysis, and RT-PCR. Samples of NHP gene-expressing tissue may also be evaluated immunocytochemically using antibodies specific for the NHP transgene product.

[0058] The present invention also provides for “knock-in” animals. Knock-in animals are those in which a polynucleotide sequence (i.e., a gene or a cDNA) that the animal does not naturally have in its genome is inserted in such a way that it is expressed. Examples include, but are not limited to, a human gene or cDNA used to replace its murine ortholog in the mouse, a murine cDNA used to replace the murine gene in the mouse, and a human gene or cDNA or murine cDNA that is tagged with a reporter construct used to replace the murine ortholog or gene in the mouse. Such replacements can occur at the locus of the murine ortholog or gene, or at another specific site. Such knock-in animals are useful for the in vivo study, testing and validation of, intra alia, human drug targets, as well as for compounds that are directed at the same, and therapeutic proteins.

### 7.2 NHPS and NHP Polypeptides

[0059] NHPs, NHP polypeptides, NHP peptide fragments, mutated, truncated, or deleted forms of the NHPs, and/or NHP fusion proteins can be prepared for a variety of uses. These uses include, but are not limited to, the generation of antibodies, as reagents in diagnostic assays, for the identification of other cellular gene products related to a NHP, and as reagents in assays for screening for compounds that can be used as pharmaceutical reagents useful in the therapeutic treatment of mental, biological, or medical disorders and diseases. Given the similarity information and expression data, the described NHPs can be targeted (by drugs, oligos, antibodies, etc.) in order to treat disease, or to therapeutically augment the efficacy of therapeutic agents.

[0060] The Sequence Listing discloses the amino acid sequences encoded by the described NHP-encoding polynucleotides. The NHPs display initiator methionines that are present in DNA sequence contexts consistent with eucaryotic translation initiation sites. The NHPs do not display signal-like sequences, which indicates that they may not be membrane associated, and are possibly cytoplasmic or nuclear proteins, although they may also be secreted proteins.

[0061] The NHP amino acid sequences of the invention include the amino acid sequences presented in the Sequence Listing, as well as analogues and derivatives thereof. Further, corresponding NHP homologues from other species are encompassed by the invention. In fact, any NHP protein encoded by the NHP nucleotide sequences described herein are within the scope of the invention, as are any novel polynucleotide sequences encoding all or any novel portion of an amino acid sequence presented in the Sequence Listing. The degenerate nature of the genetic code is well-known, and, accordingly, each amino acid presented in the Sequence Listing is generically representative of the well-known nucleic acid “triplet” codon, or in many cases codons, that can encode the amino acid. As such, as contemplated herein, the amino acid sequences presented in the Sequence Listing, when taken together with the genetic code (see, for example, “Molecular Cell Biology”, Table 4-1 at page 109 (Darnell et al., eds., Scientific American Books, New York, N.Y., 1986)), are generically representative of all the various permutations and combinations of nucleic acid sequences that can encode such amino acid sequences.

[0062] The invention also encompasses proteins that are functionally equivalent to the NHPs encoded by the presently described nucleotide sequences, as judged by any of a number of criteria, including, but not limited to, the ability to bind and modify a NHP substrate, the ability to effect an identical or complementary downstream pathway, or a change in cellular metabolism (e.g., proteolytic activity, ion flux, phosphorylation, etc.). Such functionally equivalent NHP proteins include, but are not limited to, additions or substitutions of amino acid residues within the amino acid sequence encoded by the NHP nucleotide sequences described herein, but that result in a silent change, thus producing a functionally equivalent expression product. Amino acid substitutions may be made on the basis of similarity in polarity, charge, solubility, hydrophobicity, hydrophilicity, and/or the amphipathic nature of the residues involved. For example, nonpolar (hydrophobic) amino acids include alanine, leucine, isoleucine, valine, proline, phenylalanine, tryptophan, and methionine; polar neutral amino acids include glycine, serine, threonine, cysteine, tyrosine, asparagine, and glutamine; positively charged (basic) amino acids include arginine, lysine, and histidine; and negatively charged (acidic) amino acids include aspartic acid and glutamic acid.

[0063] A variety of host-expression vector systems can be used to express the NHP nucleotide sequences of the invention. Where the NHP peptide or polypeptide can exist, or has been engineered to exist, as a soluble or secreted molecule, the soluble NHP peptide or polypeptide can be recovered from the culture media. Such expression systems also encompass engineered host cells that express a NHP, or functional equivalent, in situ. Purification or enrichment of a NHP from such expression systems can be accomplished using appropriate detergents and lipid micelles and methods well-known to those skilled in the art. However, such engineered host cells themselves may be used in situations where it is important not only to retain the structural and functional characteristics of a NHP, but to assess biological activity, e.g., in certain drug screening assays.

[0064] The expression systems that may be used for purposes of the invention include, but are not limited to, microorganisms such as bacteria (e.g., E. coli, B. subtilis) transformed with recombinant bacteriophage DNA, plasmid DNA or cosmid DNA expression vectors containing NHP nucleotide sequences; yeast (e.g., Saccharomyces, Pichia) transformed with recombinant yeast expression vectors containing NHP nucleotide sequences; insect cell systems infected with recombinant virus expression vectors (e.g., baculovirus) containing NHP nucleotide sequences; plant cell systems infected with recombinant virus expression vectors (e.g., cauliflower mosaic virus, CaMV; tobacco mosaic virus, TMV) or transformed with recombinant plasmid expression vectors (e.g., Ti plasmid) containing NHP nucleotide sequences; or mammalian cell systems (e.g., COS, CHO, BHK, 293, 3T3) harboring recombinant expression constructs containing NHP nucleotide sequences and promoters derived from the genome of mammalian cells (e.g., metallothionein promoter) or from mammalian viruses (e.g., the adenovirus late promoter; the vaccinia virus 7.5K promoter).

[0065] In bacterial systems, a number of expression vectors may be advantageously selected depending upon the use intended for the NHP product being expressed. For example, when a large quantity of such a protein is to be produced for the generation of pharmaceutical compositions of or containing a NHP, or for raising antibodies to a NHP, vectors that direct the expression of high levels of fusion protein products that are readily purified may be desirable. Such vectors include, but are not limited to, the E. coli expression vector pUR278 (Ruther and Muller-Hill, EMBO J. 2:1791-1794, 1983), in which a NHP coding sequence may be ligated individually into the vector in-frame with the lacZ coding region so that a fusion protein is produced; pIN vectors (Inouye and Inouye, Nucl. Acids Res. 13:3101-3109, 1985; Van Heeke and Schuster, J. Biol. Chem. 264:5503-5509, 1989); and the like. PGEX vectors may also be used to express foreign polypeptides as fusion proteins with glutathione S-transferase (GST). In general, such fusion proteins are soluble and can easily be purified from lysed cells by adsorption to glutathione-agarose beads followed by elution in the presence of free glutathione. The pGEX vectors are designed to include thrombin or factor Xa protease cleavage sites so that the cloned target expression product can be released from the GST moiety.

[0066] In an exemplary insect system, Autographa californica nuclear polyhedrosis virus (AcNPV) is used as a vector to express foreign polynucleotide sequences. The virus grows in Spodoptera frugiperda cells. A NHP coding sequence can be cloned individually into a non-essential region (for example the polyhedrin gene) of the virus and placed under control of an AcNPV promoter (for example the polyhedrin promoter). Successful insertion of a NHP coding sequence will result in inactivation of the polyhedrin gene and production of non-occluded recombinant virus (i.e., virus lacking the proteinaceous coat coded for by the polyhedrin gene). These recombinant viruses are then used to infect Spodoptera frugiperda cells in which the inserted sequence is expressed (see, e.g., Smith et al., J. Virol. 46:584-593, 1983, and U.S. Pat. No. 4,215,051).

[0067] In mammalian host cells, a number of viral-based expression systems may be utilized. In cases where an adenovirus is used as an expression vector, the NHP nucleotide sequence of interest may be ligated to an adenovirus transcription/translation control complex, e.g., the late promoter and tripartite leader sequence. This chimeric sequence may then be inserted in the adenovirus genome by in vitro or in vivo recombination. Insertion in a non-essential region of the viral genome (e.g., region E1 or E3) will result in a recombinant virus that is viable and capable of expressing a NHP product in infected hosts (see, e.g., Logan and Shenk, Proc. Natl. Acad. Sci. USA 81:3655-3659, 1984). Specific initiation signals may also be required for efficient translation of inserted NHP nucleotide sequences. These signals include the ATG initiation codon and adjacent sequences. In cases where an entire NHP gene or cDNA, including its own initiation codon and adjacent sequences, is inserted into the appropriate expression vector, no additional translational control signals may be needed. However, in cases where only a portion of a NHP coding sequence is inserted, exogenous translational control signals, including, perhaps, the ATG initiation codon, may be provided. Furthermore, the initiation codon should be in phase with the reading frame of the desired coding sequence to ensure translation of the entire insert. These exogenous translational control signals and initiation codons can be of a variety of origins, both natural and synthetic. The efficiency of expression may be enhanced by the inclusion of appropriate transcription enhancer elements, transcription terminators, etc. (see, e.g., Bitter et al., Methods in Enzymol. 153:516-544, 1987).

[0068] In addition, a host cell strain may be chosen that modulates the expression of the inserted sequences, or modifies and processes the expression product in the specific fashion desired. Such modifications (e.g., glycosylation) and processing (e.g., cleavage) of protein products may be important for the function of the protein. Different host cells have characteristic and specific mechanisms for the post-translational processing and modification of proteins and expression products. Appropriate cell lines or host systems can be chosen to ensure the desired modification and processing of the foreign protein expressed. To this end, eukaryotic host cells that possess the cellular machinery for the desired processing of the primary transcript, glycosylation, and phosphorylation of the expression product may be used. Such mammalian host cells include, but are not limited to, CHO, VERO, BHK, HeLa, COS, MDCK, 293, 3T3, WI38, and in particular, human cell lines.

[0069] For long-term, high-yield production of recombinant proteins, stable expression is preferred. For example, cell lines that stably express the NHP sequences described herein can be engineered. Rather than using expression vectors that contain viral origins of replication, host cells can be transformed with DNA controlled by appropriate expression control elements (e.g., promoter, enhancer sequences, transcription terminators, polyadenylation sites, etc.), and a selectable marker. Following the introduction of the foreign DNA, engineered cells may be allowed to grow for 1-2 days in an enriched media, and then switched to a selective media. The selectable marker in the recombinant plasmid confers resistance to the selection and allows cells to stably integrate the plasmid into their chromosomes and grow to form foci, which in turn can be cloned and expanded into cell lines. This method may advantageously be used to engineer cell lines that express the a product. Such engineered cell lines may be particularly useful in screening and evaluation of compounds that affect the endogenous activity of a NHP product.

[0070] A number of selection systems may be used, including, but not limited to, the herpes simplex virus thymidine kinase (Wigler et al., Cell 11:223-232, 1977), hypoxanthine-guanine phosphoribosyltransferase (Szybalska and Szybalski, Proc. Natl. Acad. Sci. USA 48:2026-2034, 1962), and adenine phosphoribosyltransferase (Lowy et al., Cell 22:817-823, 1980) genes, which can be employed in tk⁻, hgprt⁻ or aprt⁻ cells, respectively. Also, anti-metabolite resistance can be used for selection with the following genes: dihydrofolate reductase (dhfr), which confers resistance to methotrexate (Wigler et al., Proc. Natl. Acad. Sci. USA 77:3567-3570, 1980, and O'Hare et al., Proc. Natl. Acad. Sci. USA 78:1527-1531, 1981); guanine phosphoribosyl transferase (gpt), which confers resistance to mycophenolic acid (Mulligan and Berg, Proc. Natl. Acad. Sci. USA 78:2072-2076, 1981); neomycin phosphotransferase (neo), which confers resistance to G-418 (Colbere-Garapin et al., J. Mol. Biol. 150:1-14, 1981); and hygromycin B phosphotransferase (hpt), which confers resistance to hygromycin (Santerre et al., Gene 30:147-156, 1984).

[0071] Alternatively, any fusion protein can be readily purified by utilizing an antibody specific for the fusion protein being expressed. Another exemplary system allows for the ready purification of non-denatured fusion proteins expressed in human cell lines (Janknecht et al., Proc. Natl. Acad. Sci. USA 88:8972-8976, 1991). In this system, the sequence of interest is subcloned into a vaccinia recombination plasmid such that the sequence's open reading frame is translationally fused to an amino-terminal tag consisting of six histidine residues. Extracts from cells infected with recombinant vaccinia virus are loaded onto Ni²⁺.nitriloacetic acid-agarose columns, and histidine-tagged proteins are selectively eluted with imidazole-containing buffers.

[0072] Also encompassed by the present invention are fusion proteins that direct a NHP to a target organ and/or facilitate transport across the membrane into the cytosol. Conjugation of NHPs to antibody molecules or their Fab fragments could be used to target cells bearing a particular epitope. Attaching an appropriate signal sequence to a NHP would also transport a NHP to a desired location within the cell. Alternatively targeting of a NHP or its nucleic acid sequence might be achieved using liposome or lipid complex based delivery systems. Such technologies are described in “Liposomes: A Practical Approach” (New, R.R.C., ed., IRL Press, New York, N.Y., 1990), and in U.S. Pat. Nos. 4,594,595, 5,459,127, 5,948,767 and 6,110,490. Additionally embodied are novel protein constructs engineered in such a way that they facilitate transport of NHPs to a target site or desired organ, where they cross the cell membrane and/or the nucleus where the NHPs can exert their functional activity. This goal may be achieved by coupling of a NHP to a cytokine or other ligand that provides targeting specificity, and/or to a protein transducing domain (see, e.g., U.S. Provisional Patent Application Ser. Nos. 60/111,701 and 60/056,713), to facilitate passage across cellular membranes, and can optionally be engineered to include nuclear localization signals.

[0073] Additionally contemplated are oligopeptides that are modeled on an amino acid sequence first described in the Sequence Listing. Such NHP oligopeptides are generally between about 10 to about 100 amino acids long, or between about 16 to about 80 amino acids long, or between about 20 to about 35 amino acids long, or any variation or combination of sizes represented therein that incorporate a contiguous region of sequence first disclosed in the Sequence Listing. Such NHP oligopeptides can be of any length disclosed within the above ranges and can initiate at any amino acid position represented in the Sequence Listing.

[0074] The invention also contemplates “substantially isolated” or “substantially pure” proteins or polypeptides. By a “substantially isolated” or “substantially pure” protein or polypeptide is meant a protein or polypeptide that has been separated from at least some of those components that naturally accompany it. Typically, the protein or polypeptide is substantially isolated or pure when it is at least 60%, by weight, free from the proteins and other naturally-occurring organic molecules with which it is naturally associated in vivo. Preferably, the purity of the preparation is at least 75%, more preferably at least 90%, and most preferably at least 99%, by weight. A substantially isolated or pure protein or polypeptide may be obtained, for example, by extraction from a natural source, by expression of a recombinant nucleic acid encoding the protein or polypeptide, or by chemically synthesizing the protein or polypeptide.

[0075] Purity can be measured by any appropriate method, e.g., column chromatography such as immunoaffinity chromatography using an antibody specific for the protein or polypeptide, polyacrylamide gel electrophoresis, or HPLC analysis. A protein or polypeptide is substantially free of naturally associated components when it is separated from at least some of those contaminants that accompany it in its natural state. Thus, a polypeptide that is chemically synthesized or produced in a cellular system different from the cell from which it naturally originates will be, by definition, substantially free from its naturally associated components. Accordingly, substantially isolated or pure proteins or polypeptides include eukaryotic proteins synthesized in E. coli, other prokaryotes, or any other organism in which they do not naturally occur.

### 7.3 Antibodies to NHP Products

[0076] Antibodies that specifically recognize one or more epitopes of a NHP, epitopes of conserved variants of a NHP, or peptide fragments of a NHP, are also encompassed by the invention. Such antibodies include, but are not limited to, polyclonal antibodies, monoclonal antibodies (mAbs), humanized or chimeric antibodies, single chain antibodies, Fab fragments, F(ab′)₂ fragments, fragments produced by a Fab expression library, anti-idiotypic (anti-Id) antibodies, and epitope-binding fragments of any of the above.

[0077] The antibodies of the invention can be used, for example, in the detection of a NHP in a biological sample and may, therefore, be utilized as part of a diagnostic or prognostic technique whereby patients may be tested for abnormal amounts of a NHP. Such antibodies may also be utilized in conjunction with, for example, compound screening schemes for the evaluation of the effect of test compounds on expression and/or activity of a NHP expression product. Additionally, such antibodies can be used in conjunction with gene therapy to, for example, evaluate normal and/or engineered NHP-expressing cells prior to their introduction into a patient. Such antibodies may additionally be used in methods for the inhibition of abnormal NHP activity. Thus, such antibodies may be utilized as a part of treatment methods.

[0078] For the production of antibodies, various host animals may be immunized by injection with a NHP, a NHP peptide (e.g., one corresponding to a functional domain of a NHP), a truncated NHP polypeptide (a NHP in which one or more domains have been deleted), functional equivalents of a NHP or mutated variants of a NHP. Such host animals may include, but are not limited to, pigs, rabbits, mice, goats, and rats, to name but a few. Various adjuvants may be used to increase the immunological response, depending on the host species, including, but not limited to, Freund's adjuvant (complete and incomplete), mineral salts such as aluminum hydroxide or aluminum phosphate, chitosan, surface active substances such as lysolecithin, pluronic polyols, polyanions, peptides, oil emulsions, and potentially useful human adjuvants such as BCG (bacille Calmette-Guerin) and Corynebacterium parvum. Alternatively, the immune response could be enhanced by combination and/or coupling with molecules such as keyhole limpet hemocyanin, tetanus toxoid, diphtheria toxoid, ovalbumin, cholera toxin, or fragments thereof. Polyclonal antibodies are heterogeneous populations of antibody molecules derived from the sera of the immunized animals.

[0079] Monoclonal antibodies, which are homogeneous populations of antibodies to a particular antigen, can be obtained by any technique that provides for the production of antibody molecules by continuous cell lines in culture. These include, but are not limited to, the hybridoma technique (Kohler and Milstein, Nature 256:495-497, 1975, and U.S. Pat. No. 4,376,110), the human B-cell hybridoma technique (Kosbor et al., Immunology Today 4:72, 1983, and Cole et al., Proc. Natl. Acad. Sci. USA 80:2026-2030, 1983), and the EBV-hybridoma technique (Cole et al., in “Monoclonal Antibodies and Cancer Therapy”, Vol. 27, UCLA Symposia on Molecular and Cellular Biology, New Series, pp. 77-96 (Reisfeld and Sell, eds., Alan R. Liss, Inc. N.Y., 1985)). Such antibodies may be of any immunoglobulin class, including IgG, IgM, IgE, IgA, and IgD, and any subclass thereof. The hybridomas producing the mAbs of this invention may be cultivated in vitro or in vivo. Production of high titers of mAbs in vivo makes this the presently preferred method of production.

[0080] In addition, techniques developed for the production of “chimeric antibodies” (Morrison et al., Proc. Natl. Acad. Sci. USA 81:6851-6855, 1984, Neuberger et al., Nature 312:604-608, 1984, and Takeda et al., Nature 314:452-454, 1985) by splicing the genes from a mouse antibody molecule of appropriate antigen specificity together with genes from a human antibody molecule of appropriate biological activity can be used. A chimeric antibody is a molecule in which different portions are derived from different animal species, such as those having a variable region derived from a murine mAb and a human immunoglobulin constant region. Such technologies are described in U.S. Pat. Nos. 6,114,598, 6,075,181 and 5,877,397. Also encompassed by the present invention is the use of fully humanized monoclonal antibodies, as described in U.S. Pat. No. 6,150,584.

[0081] Alternatively, techniques described for the production of single chain antibodies (U.S. Pat. No. 4,946,778, Bird, Science 242:423-426, 1988, Huston et al., Proc. Natl. Acad. Sci. USA 85:5879-5883, 1988, and Ward et al., Nature 341:544-546, 1989) can be adapted to produce single chain antibodies against NHP expression products. Single chain antibodies are formed by linking the heavy and light chain fragments of the Fv region via an amino acid bridge, resulting in a single chain polypeptide.

[0082] Antibody fragments that recognize specific epitopes may be generated by known techniques. For example, such fragments include, but are not limited to: F(ab′)₂ fragments, which can be produced by pepsin digestion of an antibody molecule; and Fab fragments, which can be generated by reducing the disulfide bridges of F(ab′)₂ fragments. Alternatively, Fab expression libraries may be constructed (Huse et al., Science 246:1275-1281, 1989) to allow rapid and easy identification of monoclonal Fab fragments with the desired specificity.

[0083] Antibodies to a NHP can, in turn, be utilized to generate anti-idiotype antibodies that “mimic” a given NHP, using techniques well-known to those skilled in the art (see, e.g., Greenspan and Bona, FASEB J. 7:437-444, 1993, and Nissinoff, J. Immunol. 147:2429-2438, 1991). For example, antibodies that bind to a NHP domain and competitively inhibit the binding of a NHP to its cognate receptor/ligand can be used to generate anti-idiotypes that “mimic” the NHP and, therefore, bind, activate, or neutralize a NHP, NHP receptor, or NHP ligand. Such anti-idiotypic antibodies, or Fab fragments of such anti-idiotypes, can be used in therapeutic regimens involving a NHP-mediated pathway.

[0084] Additionally given the high degree of relatedness of mammalian NHPs, NHP knock-out mice (having never seen a NHP, and thus never been tolerized to a NHP) have a unique utility, as they can be advantageously applied to the generation of antibodies against the disclosed mammalian NHPs (i.e., a NHP will be immunogenic in NHP knock-out animals).

[0085] The present invention is not to be limited in scope by the specific embodiments described herein, which are intended as single illustrations of individual aspects of the invention, and functionally equivalent methods and components are within the scope of the invention. Indeed, various modifications of the invention, in addition to those shown and described herein, will become apparent to those skilled in the art from the foregoing description. Such modifications are intended to fall within the scope of the appended claims. All cited publications, patents, and patent applications are herein incorporated by reference in their entirety.

1. An isolated nucleic acid molecule that encodes the amino acid sequence of SEQ ID NO:2, 4, 6, 8, 10, 12, 15, 17, 19, 22, 25, 27, 29, 31, 33, 35, 37, 39, 41, 43, 45, 47, 49, 51, 53, 55, 57, 59, 61, 63, 65, 67, 69, 71, 75, 77, 80, 83, 85, 87, 89, 92, 94, 96, 98, 100, 102, 104, 106, 108, 110, 112, 114, 116, 118, 120, 122, 124, 126, 128, 130, 132, 134, 136, 138, 140, 142, 144, 146, 148, 150, 152, 154, 156, 158, 161, 163, 165, 167, 169, 172, 174, 177, 179, 181, 183, 186, 188, 191, 194, 196, 198, 200, 202, 204, 206, 208, 210, 212, 214, 216, 218, 220, 222, 224, 226, 228, 230, 232, 234, 236, 238, 240, 242, 244, 246, 249, 251, 253, 255, 257, 259, 261, 263, 265, 267, 269, 271, 273, 275, or 278.

2. The isolated nucleic acid molecule of claim 1, wherein said nucleic acid molecule comprises the nucleotide sequence of SEQ ID NO:1, 3, 5, 7, 9, 11, 14, 16, 18, 21, 24, 26, 28, 30, 32, 34, 36, 38, 40, 42, 44, 46, 48, 50, 52, 54, 56, 58, 60, 62, 64, 66, 68, 70, 74, 76, 79, 82, 84, 86, 88, 91, 93, 95, 97, 99, 101, 103, 105, 107, 109, 111, 113, 115, 117, 119, 121, 123, 125, 127, 129, 131, 133, 135, 137, 139, 141, 143, 145, 147, 149, 151, 153, 155, 157, 160, 162, 164, 166, 168, 171, 173, 176, 178, 180, 182, 185, 187, 190, 193, 195, 197, 199, 201, 203, 205, 207, 209, 211, 213, 215, 217, 219, 221, 223, 225, 227, 229, 231, 233, 235, 237, 239, 241, 243, 245, 248, 250, 252, 254, 256, 258, 260, 262, 264, 266, 268, 270, 272, 274, or 277.

3. An expression vector comprising the isolated nucleic acid molecule of claim 1.

4. (canceled)

5. An isolated polypeptide comprising the amino acid sequence of SEQ ID NO:2, 4, 6, 8, 10, 12, 15, 17, 19, 22, 25, 27, 29, 31, 33, 35, 37, 39, 41, 43, 45, 47, 49, 51, 53, 55, 57, 59, 61, 63, 65, 67, 69, 71, 75, 77, 80, 83, 85, 87, 89, 92, 94, 96, 98, 100, 102, 104, 106, 108, 110, 112, 114, 116, 118, 120, 122, 124, 126, 128, 130, 132, 134, 136, 138, 140, 142, 144, 146, 148, 150, 152, 154, 156, 158, 161, 163, 165, 167, 169, 172, 174, 177, 179, 181, 183, 186, 188, 191, 194, 196, 198, 200, 202, 204, 206, 208, 210, 212, 214, 216, 218, 220, 222, 224, 226, 228, 230, 253, 255, 257, 259, 261, 263, 265, 267, 269, 271, 273, 275, or 278.

The application's sequence listing, which the Patent Office published only in electronic form, follows.

SEQUENCE LISTING (279 sequences)

SEQ ID NO: 1 - DNA, 561 bp, Homo sapiens
  CDS (1)...(561)
atggaaaagtatgaaaaattagctaagactggagaagggtcttatggggttgtattcaaatgcagaaacaaaacctctggacaagtagtagctgttaaaaaatttgtggaatctgaagatgatcctgttgttaagaaaatagcactaagagaaatacgtatgttgaagcaattaaaacatccaaatcttgtgaacctcatcgaggtgttcaggagaaaaaggaaaatgcatttagtttttgaatactgtgatcatacacttttaaatgagctggaaagaaacccaaatggagttgctgatggagtgatcaaaagcgtattatggcaaacacttcaagctcttaatttctgtcatatacataactgtattcacagagatataaaacctgaaaatattctaataactaagcaaggaataatcaagatttgtgacttcgggtttgcacaaattctgagttggacttcatctttctctggtgcctccttgattggcttaatagttgaccttctgaattctttttctgccaattcagagatttttctcctggcttggatccattgc

SEQ ID NO: 2 - protein, 187 aa, Homo sapiens
MEKYEKLAKTGEGSYGVVFKCRNKTSGQVVAVKKFVESEDDPVVKKIALREIRMLKQLKHPNLVNLIEVFRRKRKMHLVFEYCDHTLLNELERNPNGVADGVIKSVLWQTLQALNFCHIHNCIHRDIKPENILITKQGIIKICDFGFAQILSWTSSFSGASLIGLIVDLLNSFSANSEIFLLAWIHC

SEQ ID NO: 3 - DNA, 1068 bp, Homo sapiens
  CDS (1)...(1068)
atggaaaagtatgaaaaattagctaagactggagaagggtcttatggggttgtattcaaatgcagaaacaaaacctctggacaagtagtagctgttaaaaaatttgtggaatctgaagatgatcctgttgttaagaaaatagcactaagagaaatacgtatgttgaagcaattaaaacatccaaatcttgtgaacctcatcgaggtgttcaggagaaaaaggaaaatgcatttagtttttgaatactgtgatcatacacttttaaatgagctggaaagaaacccaaatggagttgctgatggagtgatcaaaagcgtattatggcaaacacttcaagctcttaatttctgtcatatacataactgtattcacagagatataaaacctgaaaatattctaataactaagcaaggaataatcaagatttgtgacttcgggtttgcacaaattctgattccaggagatgcctacaccgattatgtagctacgagatggtaccgagctcctgaacttcttgtgggagatactcagtatggttcttcagtcgatatatgggctattggttgtgtttttgcagagctcctgacaggccagccactgtggcctggaaaatcagatgtggaccaactttatctgataatcagaacactagtagagacggggtttcgccatgttgaccaggctggtctcgaactcttgacgtcaagtgatccacctgccgtagcctctcaaagtgctggaattacaggaaaattaatcccaagacatcaatcaatctttaaaagtaacgggtttttccatggcatcagtatacctgagccagaagacatggaaactcttgaggaaaagttctcagatgttcatcctgtggctctgaacttcatgaaggggtgtctgaagatgaatccagatgacagattaacctgttcccaactcctggagagctcctactttgattcttttcaagaggcccaaattaaaagaaaagcacgtaatgaaggaagaaacagaagacgccaacaggtcagaggctgtgtttggctgctgcagctctgctccaggctgcat

SEQ ID NO: 4 - protein, 356 aa, Homo sapiens
MEKYEKLAKTGEGSYGVVFKCRNKTSGQVVAVKKFVESEDDPVVKKIALREIRMLKQLKHPNLVNLIEVFRRKRKMHLVFEYCDHTLLNELERNPNGVADGVIKSVLWQTLQALNFCHIHNCIHRDIKPENILITKQGIIKICDFGFAQILIPGDAYTDYVATRWYRAPELLVGDTQYGSSVDIWAIGCVFAELLTGQPLWPGKSDVDQLYLIIRTLVETGFRHVDQAGLELLTSSDPPAVASQSAGITGKLIPRHQSIFKSNGFFHGISIPEPEDMETLEEKFSDVHPVALNFMKGCLKMNPDDRLTCSQLLESSYFDSFQEAQIKRKARNEGRNRRRQQVRGCVWLLQLCSRLH

SEQ ID NO: 5 - DNA, 972 bp, Homo sapiens
  CDS (1)...(972)
atggaaaagtatgaaaaattagctaagactggagaagggtcttatggggttgtattcaaatgcagaaacaaaacctctggacaagtagtagctgttaaaaaatttgtggaatctgaagatgatcctgttgttaagaaaatagcactaagagaaatacgtatgttgaagcaattaaaacatccaaatcttgtgaacctcatcgaggtgttcaggagaaaaaggaaaatgcatttagtttttgaatactgtgatcatacacttttaaatgagctggaaagaaacccaaatggagttgctgatggagtgatcaaaagcgtattatggcaaacacttcaagctcttaatttctgtcatatacataactgtattcacagagatataaaacctgaaaatattctaataactaagcaaggaataatcaagatttgtgacttcgggtttgcacaaattctgattccaggagatgcctacaccgattatgtagctacgagatggtaccgagctcctgaacttcttgtgggagatactcagtatggttcttcagtcgatatatgggctattggttgtgtttttgcagagctcctgacaggccagccactgtggcctggaaaatcagatgtggaccaactttatctgataatcagaacactaggaaaattaatcccaagacatcaatcaatctttaaaagtaacgggtttttccatggcatcagtatacctgagccagaagacatggaaactcttgaggaaaagttctcagatgttcatcctgtggctctgaacttcatgaaggggtgtctgaagatgaatccagatgacagattaacctgttcccaactcctggagagctcctactttgattcttttcaagaggcccaaattaaaagaaaagcacgtaatgaaggaagaaacagaagacgccaacaggtcagaggctgtgtttggctgctgcagctctgctccaggctgcat

SEQ ID NO: 6 - protein, 324 aa, Homo sapiens
MEKYEKLAKTGEGSYGVVFKCRNKTSGQVVAVKKFVESEDDPVVKKIALREIRMLKQLKHPNLVNLIEVFRRKRKMHLVFEYCDHTLLNELERNPNGVADGVIKSVLWQTLQALNFCHIHNCIHRDIKPENILITKQGIIKICDFGFAQILIPGDAYTDYVATRWYRAPELLVGDTQYGSSVDIWAIGCVFAELLTGQPLWPGKSDVDQLYLIIRTLGKLIPRHQSIFKSNGFFHGISIPEPEDMETLEEKFSDVHPVALNFMKGCLKMNPDDRLTCSQLLESSYFDSFQEAQIKRKARNEGRNRRRQQVRGCVWLLQLCSRLH

SEQ ID NO: 7 - DNA, 594 bp, Homo sapiens
  CDS (1)...(594)
atggaaaagtatgaaaaattagctaagactggagaagggtcttatggggttgtattcaaatgcagaaacaaaacctctggacaagtagtagctgttaaaaaatttgtggaatctgaagatgatcctgttgttaagaaaatagcactaagagaaatacgtatgttgaagcaattaaaacatccaaatcttgtgaacctcatcgaggtgttcaggagaaaaaggaaaatgcatttagtttttgaatactgtgatcatacacttttaaatgagctggaaagaaacccaaatggagttgctgatggagtgatcaaaagcgtattatggcaaacacttcaagctcttaatttctgtcatatacataactgtattcacagagatataaaacctgaaaatattctaataactaagcaaggaataatcaagatttgtgacttcgggtttgcacaaattctgagttggacttcatctttctctggtgcctccttgattggcttaatagttgaccttctgaattctttttctgccaattcagagatttttctcctggcttggatccattgctggaaaattaatcccaagacatcaatcaatctt

SEQ ID NO: 8 - protein, 198 aa, Homo sapiens
MEKYEKLAKTGEGSYGVVFKCRNKTSGQVVAVKKFVESEDDPVVKKIALREIRMLKQLKHPNLVNLIEVFRRKRKMHLVFEYCDHTLLNELERNPNGVADGVIKSVLWQTLQALNFCHIHNCIHRDIKPENILITKQGIIKICDFGFAQILSWTSSFSGASLIGLIVDLLNSFSANSEIFLLAWIHCWKINPKTSINL

SEQ ID NO: 9 - DNA, 1041 bp, Homo sapiens
  CDS (1)...(1041)
atggaaaagtatgaaaaattagctaagactggagaagggtcttatggggttgtattcaaatgcagaaacaaaacctctggacaagtagtagctgttaaaaaatttgtggaatctgaagatgatcctgttgttaagaaaatagcactaagagaaatacgtatgttgaagcaattaaaacatccaaatcttgtgaacctcatcgaggtgttcaggagaaaaaggaaaatgcatttagtttttgaatactgtgatcatacacttttaaatgagctggaaagaaacccaaatggagttgctgatggagtgatcaaaagcgtattatggcaaacacttcaagctcttaatttctgtcatatacataactgtattcacagagatataaaacctgaaaatattctaataactaagcaaggaataatcaagatttgtgacttcgggtttgcacaaattctgattccaggagatgcctacaccgattatgtagctacgagatggtaccgagctcctgaacttcttgtgggagatactcagtatggttcttcagtcgatatatgggctattggttgtgtttttgcagagctcctgacaggccagccactgtggcctggaaaatcagatgtggaccaactttatctgataatcagaacactagtagagacggggtttcgccatgttgaccaggctggtctcgaactcttgacgtcaagtgatccacctgccgtagcctctcaaagtgctggaattacaggaaaattaatcccaagacatcaatcaatctttaaaagtaacgggtttttccatggcatcagtatacctgagccagaagacatggaaactcttgaggaaaagttctcagatgttcatcctgtggctctgaacttcatgaaggggtgtctgaagatgaatccagatgacagattaacctgttcccaactcctggagagctcctactttgattcttttcaagaggcccaaattaaaagaaaagcacgtaatgaaggaagaaacagaagacgccaacaggtacttccgctcaaaagt

SEQ ID NO: 10 - protein, 347 aa, Homo sapiens
MEKYEKLAKTGEGSYGVVFKCRNKTSGQVVAVKKFVESEDDPVVKKIALREIRMLKQLKHPNLVNLIEVFRRKRKMHLVFEYCDHTLLNELERNPNGVADGVIKSVLWQTLQALNFCHIHNCIHRDIKPENILITKQGIIKICDFGFAQILIPGDAYTDYVATRWYRAPELLVGDTQYGSSVDIWAIGCVFAELLTGQPLWPGKSDVDQLYLIIRTLVETGFRHVDQAGLELLTSSDPPAVASQSAGITGKLIPRHQSIFKSNGFFHGISIPEPEDMETLEEKFSDVHPVALNFMKGCLKMNPDDRLTCSQLLESSYFDSFQEAQIKRKARNEGRNRRRQQVLPLKS

SEQ ID NO: 11 - DNA, 945 bp, Homo sapiens
  CDS (1)...(945)
atggaaaagtatgaaaaattagctaagactggagaagggtcttatggggttgtattcaaatgcagaaacaaaacctctggacaagtagtagctgttaaaaaatttgtggaatctgaagatgatcctgttgttaagaaaatagcactaagagaaatacgtatgttgaagcaattaaaacatccaaatcttgtgaacctcatcgaggtgttcaggagaaaaaggaaaatgcatttagtttttgaatactgtgatcatacacttttaaatgagctggaaagaaacccaaatggagttgctgatggagtgatcaaaagcgtattatggcaaacacttcaagctcttaatttctgtcatatacataactgtattcacagagatataaaacctgaaaatattctaataactaagcaaggaataatcaagatttgtgacttcgggtttgcacaaattctgattccaggagatgcctacaccgattatgtagctacgagatggtaccgagctcctgaacttcttgtgggagatactcagtatggttcttcagtcgatatatgggctattggttgtgtttttgcagagctcctgacaggccagccactgtggcctggaaaatcagatgtggaccaactttatctgataatcagaacactaggaaaattaatcccaagacatcaatcaatctttaaaagtaacgggtttttccatggcatcagtatacctgagccagaagacatggaaactcttgaggaaaagttctcagatgttcatcctgtggctctgaacttcatgaaggggtgtctgaagatgaatccagatgacagattaacctgttcccaactcctggagagctcctactttgattcttttcaagaggcccaaattaaaagaaaagcacgtaatgaaggaagaaacagaagacgccaacaggtacttccgctcaaaagt

SEQ ID NO: 12 - protein, 315 aa, Homo sapiens
MEKYEKLAKTGEGSYGVVFKCRNKTSGQVVAVKKFVESEDDPVVKKIALREIRMLKQLKHPNLVNLIEVFRRKRKMHLVFEYCDHTLLNELERNPNGVADGVIKSVLWQTLQALNFCHIHNCIHRDIKPENILITKQGIIKICDFGFAQILIPGDAYTDYVATRWYRAPELLVGDTQYGSSVDIWAIGCVFAELLTGQPLWPGKSDVDQLYLIIRTLGKLIPRHQSIFKSNGFFHGISIPEPEDMETLEEKFSDVHPVALNFMKGCLKMNPDDRLTCSQLLESSYFDSFQEAQIKRKARNEGRNRRRQQVLPLKS

SEQ ID NO: 13 - DNA, 1819 bp, Homo sapiens
ctccgagcgacacgcgcgggagctggggctggggctgttcggcgctgctcgaagcttcgtcaccgtcgccctgtgggtgcagtgcagcattgtactgcaagtcaatcgatacaataatttaagtcacttcagctataatggaaaagtatgaaaaattagctaagactggagaagggtcttatggggttgtattcaaatgcagaaacaaaacctctggacaagtagtagctgttaaaaaatttgtggaatctgaagatgatcctgttgttaagaaaatagcactaagagaaatacgtatgttgaagcaattaaaacatccaaatcttgtgaacctcatcgaggtgttcaggagaaaaaggaaaatgcatttagtttttgaatactgtgatcatacacttttaaatgagctggaaagaaacccaaatggagttgctgatggagtgatcaaaagcgtattatggcaaacacttcaagctcttaatttctgtcatatacataactgtattcacagagatataaaacctgaaaatattctaataactaagcaaggaataatcaagatttgtgacttcgggtttgcacaaattctgagttggacttcatctttctctggtgcctccttgattggcttaatagttgaccttctgaattctttttctgccaattcagagatttttctcctggcttggatccattgctgacacagtgtttcaccatggggcccaggctcatctcgaacttctggcctcaagtgatccttccacctcggcctcccaaagtgctggattgcaagtgtgagccaccgtgcccagccagatttttcaaacaataactactgagagctcacaagattgtttttagtgggaacacaatttcgaacaaattcttgagaacgcattccaggagatgcctacaccgattatgtagctacgagatggtaccgagctcctgaacttcttgtgggagatactcagtatggttcttcagtcgatatatgggctattggttgtgtttttgcagagctcctgacaggccagccactgtggcctggaaaatcagatgtggaccaactttatctgataatcagaacactagtagagacggggtttcgccatgttgaccaggctggtctcgaactcttgacgtcaagtgatccacctgccgtagcctctcaaagtgctggaattacaggaaaattaatcccaagacatcaatcaatctttaaaagtaacgggtttttccatggcatcagtatacctgagccagaagacatggaaactcttgaggaaaagttctcagatgttcatcctgtggctctgaacttcatgaaggggtgtctgaagatgaatccagatgacagattaacctgttcccaactcctggagagctcctactttgattcttttcaagaggcccaaattaaaagaaaagcacgtaatgaaggaagaaacagaagacgccaacaggtcagaggctgtgtttggctgctgcagctctgctccaggctgcattgagaatcgatttcgagtgtcttctcattcagggacccagccaaggagcagctcatatgggaaatatgcccttctcatggcagaggcccgaacttgaatacctaatgtctgtcaggagtgacttccgctcaaaagttaaagtgctataaaaataattccttttttgtttttgrttggctgcctttcaaagtgagacaaggtggacaccaagacctttcatttgtactggtgtagtgattgctagcttaataaatattgggaattgatgtataaaaccctagactatgaaaatatcaaaaaaaaaaaaa

SEQ ID NO: 14 - DNA, 2682 bp, Homo sapiens
  CDS (1)...(2682)
atgtttcccctgaaggacgctgaaatgggagcctttaccttctttgcctcggctctgccacatgatgtttgtggaagcaatggacttcctctcacaccaaattccatcaaaattttagggcgctttcaaatccttaaaaccatcacccatcccagactctgccagtatgtggatatttctaggggaaagcatgaacgactagtggtcgtggctgaacattgtgaacgtagtctggaagacttgcttcgagaaaggaaacctgtgagctgttcaacggttttgtgtatagcatttgaggttcttcagggcttgcagtatatgaacaaacatggtatagtacacagggcattgtctcctcataatatcctgttggaccgaaagggacatattaaattggctaaatttggactttatcacatgacagctcatggtgatgatgttgatttcccaatagggtatccctcgtacttggcccctgaggtaattgcacagggaattttcaaaaccactgatcacatgccaagtaaaaaaccattgccttctggccccaaatcagatgtatggtctcttggaatcattttatttgagctttgtgtgggaagaaaattatttcagagcttggatatttctgaaagactaaaatttttgcttactttggattgtgtagatgacactttaatagttctggctgaagagcatggttgtttggacattataaaggagcttcctgaaactgtgatagatcttttgaataagtgccttaccttccatccttctaagaggccaaccccagatgaattaatgaaggacaaagtattcagtgaggtatcacctttatataccccctttaccaaacctgccagtctgttttcatcttctctgagatgtgctgatttaactctgcctgaggatatcagtcagttgtgtaaagatataaataatgattacctggcagaaagatctattgaagaagtgtattacctttggtgtttggctggaggtgacttggagaaagagcttgtcaacaaggaaatcattcgatccaaaccacctatctgcacactccccaattttctctttgaggatggtgaaagctttggacaaggtcgagatagaagctcgcttttagatgataccactgtgacattgtcgttatgccagctaagaaatagattgaaagatgttggtggagaagcattttacccattacttgaagatgaccagtctaatttacctcattcaaacagcaataatgagttgtctgcagctgccacgctccctttaatcatcagagagaaggatacagagtaccaactaaatagaattattctcttcgacaggctgctaaaggcttatccatataaaaaaaaccaaatctggaaagaagcaagagttgacattcctcctcttatgagaggtttaacctgggctgctcttctgggagttgagggagctattcatgccaagtacgatgcaattgataaagacactccaattcctacagatagacaaattgaagtggatattcctcgctgtcatcagtacgatgaactgttatcatcaccagaaggtcatgcaaaatttaggcgtgtattaaaagcctgggtagtgtctcatcctgatcttgtgtattggcaaggtcttgactcactttgtgctccattcctatatctaaacttcaataatgaagccttggcttatgcatgtatgtctgcttttattcccaaatacctgtataacttcttcttaaaagacaactcacatgtaatacaagagtatctgactgtcttctctcagatgattgcatttcatgatccagagctgagtaatcatctcaatgagattggtttcattccagatctctatgccatcccttggtttcttaccatgtttactcatgtatttccactacacaaaattttccacctctgggataccttactacttgggaattcctctttcccattctgtattggagtagcaattcttcagcagctgcgggaccggcttttggctaatggctttaatgagtgtattcttctcttctccgatttaccagaaattgacattgaacgctgtgtgagagaatctatcaacctgttttgttggactcctaaaagtgctacttacagacagcatgctcaacctccaaagccatcttctgacagcagtggaggcagaagttcggcaccttatttctctgctgagtgtccagatcctccaaagacagatctgtcaagagaatccatcccattaaatgacctgaagtcagaagtatcaccacggatttcagcagaggacctgattgacttgtgtgagctcacagtgacaggccacttcaaaacacccagcaagaaaacaaagtccagtaaaccaaagctcctggtggttgacatccggaatagtgaagactttattcgtggtcacatttcaggaagcatcaacattccattcagtgctgccttcactgcagaaggggagcttacccagggcccttacactgctatgctccagaacttcaaagggaaggtcattgtcatcgtggggcatgtggcaaaacacacagctgagtttgcagctcaccttgtgaagatgaaatatccaagaatctgtattctagatggtggcattaataaaataaagccaacaggcctcctcaccatcccatctcctcaaatatga

SEQ ID NO: 15 - protein, 893 aa, Homo sapiens
MFPLKDAEMGAFTFFASALPHDVCGSNGLPLTPNSIKILGRFQILKTITHPRLCQYVDISRGKHERLVVVAEHCERSLEDLLRERKPVSCSTVLCIAFEVLQGLQYMNKHGIVHRALSPHNILLDRKGHIKLAKFGLYHMTAHGDDVDFPIGYPSYLAPEVIAQGIFKTTDHMPSKKPLPSGPKSDVWSLGIILFELCVGRKLFQSLDISERLKFLLTLDCVDDTLIVLAEEHGCLDIIKELPETVIDLLNKCLTFHPSKRPTPDELMKDKVFSEVSPLYTPFTKPASLFSSSLRCADLTLPEDISQLCKDINNDYLAERSIEEVYYLWCLAGGDLEKELVNKEIIRSKPPICTLPNFLFEDGESFGQGRDRSSLLDDTTVTLSLCQLRNRLKDVGGEAFYPLLEDDQSNLPHSNSNNELSAAATLPLIIREKDTEYQLNRIILFDRLLKAYPYKKNQIWKEARVDIPPLMRGLTWAALLGVEGAIHAKYDAIDKDTPIPTDRQIEVDIPRCHQYDELLSSPEGHAKFRRVLKAWVVSHPDLVYWQGLDSLCAPFLYLNFNNEALAYACMSAFIPKYLYNFFLKDNSHVIQEYLTVFSQMIAFHDPELSNHLNEIGFIPDLYAIPWFLTMFTHVFPLHKIFHLWDTLLLGNSSFPFCIGVAILQQLRDRLLANGFNECILLFSDLPEIDIERCVRESINLFCWTPKSATYRQHAQPPKPSSDSSGGRSSAPYFSAECPDPPKTDLSRESIPLNDLKSEVSPRISAEDLIDLCELTVTGHFKTPSKKTKSSKPKLLVVDIRNSEDFIRGHISGSINIPFSAAFTAEGELTQGPYTAMLQNFKGKVIVIVGHVAKHTAEFAAHLVKMKYPRICILDGGINKIKPTGLLTIPSPQI

SEQ ID NO: 16 - DNA, 1158 bp, Homo sapiens
  CDS (1)...(1158)
atggcccgggagaacggcgagagcagctcctcctggaaaaagcaagctgaagacatcaagaagatcttcgagttcaaagagaccctcggaaccggggccttttccgaagtggttttagctgaagagaaggcaactggcaagctctttgctgtgaagtgtatccctaagaaggcgctgaagggcaaggaaagcagcatagagaatgagatagccgtcctgagaaagattaagcatgaaaatattgttgccctggaagacatttatgaaagcccaaatcacctgtacttggtcatgcagctggtgtccggtggagagctgtttgaccggatagtggagaaggggttttatacagagaaggatgccagcactctgatccgccaagtcttggacgccgtgtactatctccacagaatgggcatcgtccacagagacctcaagcccgaaaatctcttgtactacagtcaagatgaggagtccaaaataatgatcagtgactttggattgtcaaaaatggagggcaaaggagatgtgatgtccactgcctgtggaactccaggctatgtcgctcctgaagtcctcgcccagaaaccttacagcaaagccgttgactgctggtccatcggagtgattgcctacatcttgctctgcggctaccctcctttttatgatgaaaatgactccaagctctttgagcagatcctcaaggcggaatatgagtttgactctccctactgggatgacatctccgactctgcaaaagacttcattcggaacctgatggagaaggacccgaataaaagatacacgtgtgagcaggcagctcggcacccatggatcgctggtgacacagccctcaacaaaaacatccacgagtccgtcagcgcccagatccggaaaaactttgccaagagcaaatggagacaagcatttaatgccacggccgtcgtgagacatatgagaaaactacacctcggcagcagcctggacagttcaaatgcaagtgtttcgagcagcctcagtttggccagccaaaaagactgtctggcaccttccacgctctgtagtttcatttcttcttcgtcgggggtctcaggagttggagccgagcggagacccaggcccaccactgtgacggcagtgcactctggaagcaagtga

SEQ ID NO: 17 - protein, 385 aa, Homo sapiens
MARENGESSSSWKKQAEDIKKIFEFKETLGTGAFSEVVLAEEKATGKLFAVKCIPKKALKGKESSIENEIAVLRKIKHENIVALEDIYESPNHLYLVMQLVSGGELFDRIVEKGFYTEKDASTLIRQVLDAVYYLHRMGIVHRDLKPENLLYYSQDEESKIMISDFGLSKMEGKGDVMSTACGTPGYVAPEVLAQKPYSKAVDCWSIGVIAYILLCGYPPFYDENDSKLFEQILKAEYEFDSPYWDDISDSAKDFIRNLMEKDPNKRYTCEQAARHPWIAGDTALNKNIHESVSAQIRKNFAKSKWRQAFNATAVVRHMRKLHLGSSLDSSNASVSSSLSLASQKDCLAPSTLCSFISSSSGVSGVGAERRPRPTTVTAVHSGSK

SEQ ID NO: 18 - DNA, 1074 bp, Homo sapiens
  CDS (1)...(1074)
atggcccgggagaacggcgagagcagctcctcctggaaaaagcaagctgaagacatcaagaagatcttcgagttcaaagagaccctcggaaccggggccttttccgaagtggttttagctgaagagaaggcaactggcaagctctttgctgtgaagtgtatccctaagaaggcgctgaagggcaaggaaagcagcatagagaatgagatagccgtcctgagaaagattaagcatgaaaatattgttgccctggaagacatttatgaaagcccaaatcacctgtacttggtcatgcagctggtgtccggtggagagctgtttgaccggatagtggagaaggggttttatacagagaaggatgccagcactctgatccgccaagtcttggacgccgtgtactatctccacagaatgggcatcgtccacagagacctcaagcccgaaaatctcttgtactacagtcaagatgaggagtccaaaataatgatcagtgactttggattgtcaaaaatggagggcaaaggagatgtgatgtccactgcctgtggaactccaggctatgtcgctcctgaagtcctcgcccagaaaccttacagcaaagccgttgactgctggtccatcggagtgattgcctacatcttgctctgcggctaccctcctttttatgatgaaaatgactccaagctctttgagcagatcctcaaggcggaatatgagtttgactctccctactgggatgacatctccgactctgcaaaagacttcattcggaacctgatggagaaggacccgaataaaagatacacgtgtgagcaggcagctcggcacccatggatcgctggtgacacagccctcaacaaaaacatccacgagtccgtcagcgcccagatccggaaaaactttgccaagagcaaatggagacaagcatttaatgccacggccgtcgtgagacatatgagaaaactacacctcggcagcagcctggacagttcaaatgcaagtgtttcgagcagcctcagtttggccagccaaaaagactgtgcgtatgtagcaaaaccagaatccctcagctga

SEQ ID NO: 19 - protein, 357 aa, Homo sapiens
MARENGESSSSWKKQAEDIKKIFEFKETLGTGAFSEVVLAEEKATGKLFAVKCIPKKALKGKESSIENEIAVLRKIKHENIVALEDIYESPNHLYLVMQLVSGGELFDRIVEKGFYTEKDASTLIRQVLDAVYYLHRMGIVHRDLKPENLLYYSQDEESKIMISDFGLSKMEGKGDVMSTACGTPGYVAPEVLAQKPYSKAVDCWSIGVIAYILLCGYPPFYDENDSKLFEQILKAEYEFDSPYWDDISDSAKDFIRNLMEKDPNKRYTCEQAARHPWIAGDTALNKNIHESVSAQIRKNFAKSKWRQAFNATAVVRHMRKLHLGSSLDSSNASVSSSLSLASQKDCAYVAKPESLS

SEQ ID NO: 20 - DNA, 1671 bp, Homo sapiens
gcgaaagaggaaactgcagaggaggaagctgcgccgcagcccgagccgcccggcatccccgccgcctctgcgcccgcgccgcgcccccggcgccccctccccagcgcgcccccggccgctcctccgcgccgggaagttgcgccgcagcccgagccgctcgtcggccatggcccgggagaacggcgagagcagctcctcctggaaaaagcaagctgaagacatcaagaagatcttcgagttcaaagagaccctcggaaccggggccttttccgaagtggttttagctgaagagaaggcaactggcaagctctttgctgtgaagtgtatccctaagaaggcgctgaagggcaaggaaagcagcatagagaatgagatagccgtcctgagaaagattaagcatgaaaatattgttgccctggaagacatttatgaaagcccaaatcacctgtacttggtcatgcagctggtgtccggtggagagctgtttgaccggatagtggagaaggggttttatacagagaaggatgccagcactctgatccgccaagtcttggacgccgtgtactatctccacagaatgggcatcgtccacagagacctcaagcccgaaaatctcttgtactacagtcaagatgaggagtccaaaataatgatcagtgactttggattgtcaaaaatggagggcaaaggagatgtgatgtccactgcctgtggaactccaggctatgtcgctcctgaagtcctcgcccagaaaccttacagcaaagccgttgactgctggtccatcggagtgattgcctacatcttgctctgcggctaccctcctttttatgatgaaaatgactccaagctctttgagcagatcctcaaggcggaatatgagtttgactctccctactgggatgacatctccgactctgcaaaagacttcattcggaacctgatggagaaggacccgaataaaagatacacgtgtgagcaggcagctcggcacccatggatcgctggtgacacagccctcaacaaaaacatccacgagtccgtcagcgcccagatccggaaaaactttgccaagagcaaatggagacaagcatttaatgccacggccgtcgtgagacatatgagaaaactacacctcggcagcagcctggacagttcaaatgcaagtgtttcgagcagcctcagtttggccagccaaaaagactgtgcgtatgtagcaaaaccagaatccctcagctgacactgaagacgagcctggggtggagaggagggagccggcatctgccgagcacctcctgtttgccaggcgctttctatacttaatcccatgtcatgcgaccctaggactttttttaacatgtaatcactgggctgggtgcagtggctcacgcctgtaatcccaacactttgggaggctgaggcaggaggactgtttgagttcaggagttttaagaccagcctgaccaacatggtgaaaccccatctctactaaaatataaaaattagccgggtgtggtggcgagcacctgtaatgtcagctacttgggaggctgaggcaggagaatcgcttgagcccggaagcggaggttgcaatgagctgagatcacaccactgcacttcagcctgggtgacagattgagactcctctcaaaaaaaaaaaaaaaaaaaaaa

SEQ ID NO: 21 - DNA, 1269 bp, Homo Sapiens
  CDS (1)...(1269)
atggaccatcctagtagggaaaaggatgaaagacaacggacaactaaacccatggcacaaaggagtgcacactgctctcgaccatctggctcctcatcgtcctctggggttcttatggtgggacccaacttcagggttggcaagaagataggatgtgggaacttcggagagctcagattaggtaaaaatctctacaccaatgaatatgtagcaatcaaactggaaccaataaaatcacgtgctccacagcttcatttagagtacagattttataaacagcttggcagtgcaggtgaaggtctcccacaggtgtattactttggaccatgtgggaaatataatgccatggtgctggagctccttggccctagcttggaggacttgtttgacctctgtgaccgaacatttactttgaagacggtgttaatgatagccatccagctgctttctcgaatggaatacgtgcactcaaagaacctcatttaccgagatgtcaagccagagaacttcctgattggtcgacaaggcaataagaaagagcatgttatacacattatagactttggactggccaaggaatacattgaccccgaaaccaaaaaacacataccttatagggaacacaaaagtttaactggaactgcaagatatatgtctatcaacacgcatcttggcaaagagcaaagccggagagatgatttggaagccctaggccatatgttcatgtatttccttcgaggcagcctcccctggcaaggactcaaggctgacacattaaaagagagatatcaaaaaattggtgacaccaaaaggaatactcccattgaagctctctgtgagaactttccagaggagatggcaacctaccttcgatatgtcaggcgactggacttctttgaaaaacctgattatgagtatttacggaccctcttcacagacctctttgaaaagaaaggctacacctttgactatgcctatgattgggttgggagacctattcctactccagtagggtcagttcacgtagattctggtgcatctgcaataactcgagaaagccacacacatagggatcggccatcacaacagcagcctcttcgaaatcaggtggttagctcaaccaatggagagctgaatgttgatgatcccacgggagcccactccaatgcaccaatcacagctcatgccgaggtggaggtagtggaggaagctaagtgctgctgtttctttaagaggaaaaggaagaagactgctcagcgccacaagtga

SEQ ID NO: 22 - protein, 422 aa, Homo Sapiens
MDHPSREKDERQRTTKPMAQRSAHCSRPSGSSSSSGVLMVGPNFRVGKKIGCGNFGELRLGKNLYTNEYVAIKLEPIKSRAPQLHLEYRFYKQLGSAGEGLPQVYYFGPCGKYNAMVLELLGPSLEDLFDLCDRTFTLKTVLMIAIQLLSRMEYVHSKNLIYRDVKPENFLIGRQGNKKEHVIHIIDFGLAKEYIDPETKKHIPYREHKSLTGTARYMSINTHLGKEQSRRDDLEALGHMFMYFLRGSLPWQGLKADTLKERYQKIGDTKRNTPIEALCENFPEEMATYLRYVRRLDFFEKPDYEYLRTLFTDLFEKKGYTFDYAYDWVGRPIPTPVGSVHVDSGASAITRESHTHRDRPSQQQPLRNQVVSSTNGELNVDDPTGAHSNAPITAHAEVEVVEEAKCCCFFKRKRKKTAQRHK

SEQ ID NO: 23 - DNA, 1968 bp, Homo Sapiens
atactgaagctacttgctgtactataggagagctctgtcctgtaggatcatggaccatcctagtagggaaaaggatgaaagacaacggacaactaaacccatggcacaaaggagtgcacactgctctcgaccatctggctcctcatcgtcctctggggttcttatggtgggacccaacttcagggttggcaagaagataggatgtgggaacttcggagagctcagattaggtaaaaatctctacaccaatgaatatgtagcaatcaaactggaaccaataaaatcacgtgctccacagcttcatttagagtacagattttataaacagcttggcagtgcaggtgaaggtctcccacaggtgtattactttggaccatgtgggaaatataatgccatggtgctggagctccttggccctagcttggaggacttgtttgacctctgtgaccgaacatttactttgaagacggtgttaatgatagccatccagctgctttctcgaatggaatacgtgcactcaaagaacctcatttaccgagatgtcaagccagagaacttcctgattggtcgacaaggcaataagaaagagcatgttatacacattatagactttggactggccaaggaatacattgaccccgaaaccaaaaaacacataccttatagggaacacaaaagtttaactggaactgcaagatatatgtctatcaacacgcatcttggcaaagagcaaagccggagagatgatttggaagccctaggccatatgttcatgtatttccttcgaggcagcctcccctggcaaggactcaaggctgacacattaaaagagagatatcaaaaaattggtgacaccaaaaggaatactcccattgaagctctctgtgagaactttccagaggagatggcaacctaccttcgatatgtcaggcgactggacttctttgaaaaacctgattatgagtatttacggaccctcttcacagacctctttgaaaagaaaggctacacctttgactatgcctatgattgggttgggagacctattcctactccagtagggtcagttcacgtagattctggtgcatctgcaataactcgagaaagccacacacatagggatcggccatcacaacagcagcctcttcgaaatcaggtggttagctcaaccaatggagagctgaatgttgatgatcccacgggagcccactccaatgcaccaatcacagctcatgccgaggtggaggtagtggaggaagctaagtgctgctgtttctttaagaggaaaaggaagaagactgctcagcgccacaagtgaccagtgcctcccaggagtcctcaggccctggggactctgactcaattgtacctgcagctcctgccatttctcattggaagggactcctctttgggggagggtggatatccaaaccaaaaagaagaaaacagatgcccccagaaggggccagtgcgggcagccagggcctagtgggtcattggccatctccgcctgcctaaggctctgagcaggtcccagagctgctgttcctccactgcttgcccatagggctgcctggttgactctccttcccattgtttacagtgaaggtgtcattcacaaaaactcaaggactgctattctccttcttccccttagtttactcctggtttttaccccaccctcaaccctctccagcataaaacctagtgagctaaaggctttgtctgcagaaggagatcaagaggcttgggggtaaggccaagaaggtaggaggaaaatggcagacctgggctggagaagaaccttctccgtatcccaggtgtgcctggcagtatggtttcctcttcctctgtgcctgtgcagcattcatcccagctggcccttggagttcaggttccttcttccctccctcctgtgaagttacactgtaggacacaagctgtgagcaatctgcagtctactggccc

SEQ ID NO: 24 - DNA, 3108 bp, Homo Sapiens
  CDS (1)...(3108)
atgaaaaacctggtactgaagataatatctggatcttttccacctgtgtctttgcattattcctatgatctccgcagtttggtgtctcagttatttaaaagaaatcctagggatagaccatcagtcaactccatattggagaaaggttttatagccaaacgcattgaaaagtttctctctcctcagcttattgcagaagaattttgtctaaaaacattttcgaagtttggatcacagcctataccagctaaaagaccagcttcaggacaaaactcgatttctgttatgcctgctcagaaaattacaaagcctgccgctaaatatggaatacctttagcatataagaaatatggagataaaaaattacacgaaaagaaaccactgcaaaaacataaacaggcccatcaaactccagagaagagagtgaatactggagaagaaaggaggaaaatatctgaggaagcagcaagaaagagaaggctggaatttattgaaaaagaaaagaaacaaaaggatcagattattagtttaatgaaggctgaacaaatgaaaaggcaagaaaaggaaaggttggaaagaataaatagggccagggaacaaggatggagaaatgtgctaagtgctggtggaagtggtgaagtaaaggctccttttctgggcagtggagggactatagctccatcatctttttcttctcgaggacagtatgaacattaccatgccatttttgaccaaatgcagcaacaaagagcagaagataatgaagctaaatggaaaagagaaatatatggtcgaggtcttccagaaaggcaaaaagggcagctagctgtagaaagagctaaacaagtagaagagttcctgcagcgaaaacgggaagctatgcagaataaagctcgagccgaaggacatatgggaatcctgcaaaacctggcagctatgtatggaggcaggcccagctcttcaagaggagggaagccaagaaacaaagaggaagaggtttatctggcaagactgaggcaaataagactacagaatttcaatgagcgccaacagattaaagccaaacttcgtggtgaaaagaaagaagctaatcattctgaaggacaagaaggaagtgaagaggctgacatgaggcgcaaaaaaatcgaatcactgaaggcccatgcaaatgcacgtgctgctgtactaaaagaacaactagaacgaaagagaaaggaggcttatgagagagaaaaaaaagtgtgggaagagcatttggtggctaaaggagttaagagttctgatgtttctccacctttgggacagcatgaaacaggtggctctccatcaaagcaacagatgagatctgttatttctgtaacttcagctttgaaagaagttggcgtggacagtagtttaactgatacccgggaaacttcagaagagatgcaaaagaccaacaatgctatttcaagtaagcgagaaatacttcgcagattaaatgaaaatcttaaagctcaagaagatgaaaaaggaatgcagaatctctctgatacttttgagataaatgttcatgaagatgccaaagagcatgaaaaagaaaaatcagtttcatctgatcgcaagaagtgggaggcaggaggtcaacttgtgattcctctggatgagttaacactagatacatccttctctacaactgaaagacatacagtgggagaagttattaaattaggtcctaatggatctccaagaagagcctgggggaaaagtccgacagattctgttctaaagatacttggagaagctgaactacaacttcagacagaactattagaaaatacaactattagaagtgagatttctcccgaaggggaaaagtacaaacccttaattactggagaaaaaaaagtacaatgtatttcacatgaaataaacccatcagctattgttgattctcctgttgagacaaaaagtcccgagttcagtgaggcatctccacagatgtcattgaaactggaaggaaatttagaagaacctgatgatttggaaacagaaattctacaagagccaagtggaacaaacaaagatgagagcttgccatgcactattactgatgtgtggattagtgaggaaaaagaaacaaaggaaactcagtcggcagataggatcaccattcaggaaaatgaagtttctgaagatggagtctcgagtactgtggaccaacttagtgacattcatatagagcctggaaccaatgattctcagcactctaaatgtgatgtagataagtctgtgcaaccggaaccatttttccataaggtggttcattctgaacacttgaacttagtccctcaagttcaatcagttcagtgttcaccagaagaatcctttgcatttcgatctcactcgcatttaccaccaaaaaataaaaacaagaattccttgctgattggactttcaactggtctgtttgatgcaaacaacccaaagatgttaaggacatgttcacttccagatctctcaaagctgttcagaacccttatggatgttcccaccgtaggagatgttcgtcaagacaatcttgaaatagatgaaattaaagatgaaaacattaaagaaggaccttctgattctgaagacattgtgtttgaagaaactgacacagatttacaagagctgcaggcctcgatggaacagttacttagggaacaacctggtgaagaatacagtgaagaagaagagtcagtcttgaagaacagtgatgtggagccaactgcaaatgggacagatgtggcagatgaagatgacaatcccagtagtgaaagtgccctgaacgaagaatggcactcagataacagtgatggtgaaattgctagtgaatgtgaatgcgatagtgtctttaaccatttagaggaactgagacttcatctggagcaggaaatgggctttgaaaaattctttgaggtttatgagaaaataaaggctattcatgaagatgaagatgaaaatattgaaatttgttcaaaaatagttcaaaatattttgggaaatgaacatcagcatctttatgccaagattcttcatttagtcatggcagatggagcctaccaagaagataatgatgaataa

SEQ ID NO: 25 - protein, 1035 aa, Homo Sapiens
MKNLVLKIISGSFPPVSLHYSYDLRSLVSQLFKRNPRDRPSVNSILEKGFIAKRIEKFLSPQLIAEEFCLKTFSKFGSQPIPAKRPASGQNSISVMPAQKITKPAAKYGIPLAYKKYGDKKLHEKKPLQKHKQAHQTPEKRVNTGEERRKISEEAARKRRLEFIEKEKKQKDQIISLMKAEQMKRQEKERLERINRAREQGWRNVLSAGGSGEVKAPFLGSGGTIAPSSFSSRGQYEHYHAIFDQMQQQRAEDNEAKWKREIYGRGLPERQKGQLAVERAKQVEEFLQRKREAMQNKARAEGHMGILQNLAAMYGGRPSSSRGGKPRNKEEEVYLARLRQIRLQNFNERQQIKAKLRGEKKEANHSEGQEGSEEADMRRKKIESLKAHANARAAVLKEQLERKRKEAYEREKKVWEEHLVAKGVKSSDVSPPLGQHETGGSPSKQQMRSVISVTSALKEVGVDSSLTDTRETSEEMQKTNNAISSKREILRRLNENLKAQEDEKGMQNLSDTFEINVHEDAKEHEKEKSVSSDRKKWEAGGQLVIPLDELTLDTSFSTTERHTVGEVIKLGPNGSPRRAWGKSPTDSVLKILGEAELQLQTELLENTTIRSEISPEGEKYKPLITGEKKVQCISHEINPSAIVDSPVETKSPEFSEASPQMSLKLEGNLEEPDDLETEILQEPSGTNKDESLPCTITDVWISEEKETKETQSADRITIQENEVSEDGVSSTVDQLSDIHIEPGTNDSQHSKCDVDKSVQPEPFFHKVVHSEHLNLVPQVQSVQCSPEESFAFRSHSHLPPKNKNKNSLLIGLSTGLFDANNPKMLRTCSLPDLSKLFRTLMDVPTVGDVRQDNLEIDEIKDENIKEGPSDSEDIVFEETDTDLQELQASMEQLLREQPGEEYSEEEESVLKNSDVEPTANGTDVADEDDNPSSESALNEEWHSDNSDGEIASECECDSVFNHLEELRLHLEQEMGFEKFFEVYEKIKAIHEDEDENIEICSKIVQNILGNEHQHLYAKILHLVMADGAYQEDNDE

SEQ ID NO: 26 - DNA, 3645 bp, Homo Sapiens
  CDS (1)...(3645)
atggagaagtatgttagactacagaagattggagaaggttcatttggaaaagccattcttgttaaatctacagaagatggcagacagtatgttatcaaggaaattaacatctcaagaatgtccagtaaagaaagagaagaatcaaggagagaagttgcagtattggcaaacatgaagcatccaaatattgtccagtatagagaatcatttgaagaaaatggctctctctacatagtaatggattactgtgagggaggggatctgtttaagcgaataaatgctcagaaaggcgttttgtttcaagaggatcagattttggactggtttgtacagatatgtttggccctgaaacatgtacatgatagaaaaattcttcatcgagacattaaatctcagaacatatttttaactaaagatggaacagtacaacttggagattttggaattgctagagttcttaatagtactgtagagctggctcgaacttgcatagggaccccatactacttgtcacctgaaatctgtgaaaacaaaccttacaataataaaagtgacatttgggctctggggtgtgtcctttatgagctgtgtacacttaaacatgcttttgaagctggcagtatgaaaaacctggtactgaagataatatctggatcttttccacctgtgtctttgcattattcctatgatctccgcagtttggtgtctcagttatttaaaagaaatcctagggatagaccatcagtcaactccatattggagaaaggttttatagccaaacgcattgaaaagtttctctctcctcagcttattgcagaagaattttgtctaaaaacattttcgaagtttggatcacagcctataccagctaaaagaccagcttcaggacaaaactcgatttctgttatgcctgctcagaaaattacaaagcctgccgctaaatatggaatacctttagcatataagaaatatggagataaaaaattacacgaaaagaaaccactgcaaaaacataaacaggcccatcaaactccagagaagagagtgaatactggagaagaaaggaggaaaatatctgaggaagcagcaagaaagagaaggctggaatttattgaaaaagaaaagaaacaaaaggatcagattattagtttaatgaaggctgaacaaatgaaaaggcaagaaaaggaaaggttggaaagaataaatagggccagggaacaaggatggagaaatgtgctaagtgctggtggaagtggtgaagtaaaggctccttttctgggcagtggagggactatagctccatcatctttttcttctcgaggacagtatgaacattaccatgccatttttgaccaaatgcagcaacaaagagcagaagataatgaagctaaatggaaaagagaaatatatggtcgaggtcttccagaaaggcaaaaagggcagctagctgtagaaagagctaaacaagtagaagagttcctgcagcgaaaacgggaagctatgcagaataaagctcgagccgaaggacatatggtttatctggcaagactgaggcaaataagactacagaatttcaatgagcgccaacagattaaagccaaacttcgtggtgaaaagaaagaagctaatcattctgaaggacaagaaggaagtgaagaggctgacatgaggcgcaaaaaaatcgaatcactgaaggcccatgcaaatgcacgtgctgctgtactaaaagaacaactagaacgaaagagaaaggaggcttatgagagagaaaaaaaagtgtgggaagagcatttggtggctaaaggagttaagagttctgatgtttctccacctttgggacagcatgaaacaggtggctctccatcaaagcaacagatgagatctgttatttctgtaacttcagctttgaaagaagttggcgtggacagtagtttaactgatacccgggaaacttcagaagagatgcaaaagaccaacaatgctatttcaagtaagcgagaaatacttcgcagattaaatgaaaatcttaaagctcaagaagatgaaaaaggaatgcagaatctctctgatacttttgagataaatgttcatgaagatgccaaagagcatgaaaaagaaaaatcagtttcatctgatcgcaagaagtgggaggcaggaggtcaacttgtgattcctctggatgagttaacactagatacatccttctctacaactgaaagacatacagtgggagaagttattaaattaggtcctaatggatctccaagaagagcctgggggaaaagtccgacagattctgttctaaagatacttggagaagctgaactacaacttcagacagaactattagaaaatacaactattagaagtgagatttctcccgaaggggaaaagtacaaacccttaattactggagaaaaaaaagtacaatgtatttcacatgaaataaacccatcagctattgttgattctcctgttgagacaaaaagtcccgagttcagtgaggcatctccacagatgtcattgaaactggaaggaaatttagaagaacctgatgatttggaaacagaaattctacaagagccaagtggaacaaacaaagatgagagcttgccatgcactattactgatgtgtggattagtgaggaaaaagaaacaaaggaaactcagtcggcagataggatcaccattcaggaaaatgaagtttctgaagatggagtctcgagtactgtggaccaacttagtgacattcatatagagcctggaaccaatgattctcagcactctaaatgtgatgtagataagtctgtgcaaccggaaccatttttccataaggtggttcattctgaacacttgaacttagtccctcaagttcaatcagttcagtgttcaccagaagaatcctttgcatttcgatctcactcgcatttaccaccaaaaaataaaaacaagaattccttgctgattggactttcaactggtctgtttgatgcaaacaacccaaagatgttaaggacatgttcacttccagatctctcaaagctgttcagaacccttatggatgttcccaccgtaggagatgttcgtcaagacaatcttgaaatagatgaaattaaagatgaaaacattaaagaaggaccttctgattctgaagacattgtgtttgaagaaactgacacagatttacaagagctgcaggcctcgatggaacagttacttagggaacaacctggtgaagaatacagtgaagaagaagagtcagtcttgaagaacagtgatgtggagccaactgcaaatgggacagatgtggcagatgaagatgacaatcccagtagtgaaagtgccctgaacgaagaatggcactcagataacagtgatggtgaaattgctagtgaatgtgaatgcgatagtgtctttaaccatttagaggaactgagacttcatctggagcaggaaatgggctttgaaaaattctttgaggtttatgagaaaataaaggctattcatgaagatgaagatgaaaatattgaaatttgttcaaaaatagttcaaaatattttgggaaatgaacatcagcatctttatgccaagattcttcatttagtcatggcagatggagcctaccaagaagataatgatgaataa

SEQ ID NO: 27 - protein, 1214 aa, Homo Sapiens
MEKYVRLQKIGEGSFGKAILVKSTEDGRQYVIKEINISRMSSKEREESRREVAVLANMKHPNIVQYRESFEENGSLYIVMDYCEGGDLFKRINAQKGVLFQEDQILDWFVQICLALKHVHDRKILHRDIKSQNIFLTKDGTVQLGDFGIARVLNSTVELARTCIGTPYYLSPEICENKPYNNKSDIWALGCVLYELCTLKHAFEAGSMKNLVLKIISGSFPPVSLHYSYDLRSLVSQLFKRNPRDRPSVNSILEKGFIAKRIEKFLSPQLIAEEFCLKTFSKFGSQPIPAKRPASGQNSISVMPAQKITKPAAKYGIPLAYKKYGDKKLHEKKPLQKHKQAHQTPEKRVNTGEERRKISEEAARKRRLEFIEKEKKQKDQIISLMKAEQMKRQEKERLERINRAREQGWRNVLSAGGSGEVKAPFLGSGGTIAPSSFSSRGQYEHYHAIFDQMQQQRAEDNEAKWKREIYGRGLPERQKGQLAVERAKQVEEFLQRKREAMQNKARAEGHMVYLARLRQIRLQNFNERQQIKAKLRGEKKEANHSEGQEGSEEADMRRKKIESLKAHANARAAVLKEQLERKRKEAYEREKKVWEEHLVAKGVKSSDVSPPLGQHETGGSPSKQQMRSVISVTSALKEVGVDSSLTDTRETSEEMQKTNNAISSKREILRRLNENLKAQEDEKGMQNLSDTFEINVHEDAKEHEKEKSVSSDRKKWEAGGQLVIPLDELTLDTSFSTTERHTVGEVIKLGPNGSPRRAWGKSPTDSVLKILGEAELQLQTELLENTTIRSEISPEGEKYKPLITGEKKVQCISHEINPSAIVDSPVETKSPEFSEASPQMSLKLEGNLEEPDDLETEILQEPSGTNKDESLPCTITDVWISEEKETKETQSADRITIQENEVSEDGVSSTVDQLSDIHIEPGTNDSQHSKCDVDKSVQPEPFFHKVVHSEHLNLVPQVQSVQCSPEESFAFRSHSHLPPKNKNKNSLLIGLSTGLFDANNPKMLRTCSLPDLSKLFRTLMDVPTVGDVRQDNLEIDEIKDENIKEGPSDSEDIVFEETDTDLQELQASMEQLLREQPGEEYSEEEESVLKNSDVEPTANGTDVADEDDNPSSESALNEEWHSDNSDGEIASECECDSVFNHLEELRLHLEQEMGFEKFFEVYEKIKAIHEDEDENIEICSKIVQNILGNEHQHLYAKILHLVMADGAYQEDNDE

SEQ ID NO: 28 - DNA, 3024 bp, Homo Sapiens
  CDS (1)...(3024)
atgaaaaacctggtactgaagataatatctggatcttttccacctgtgtctttgcattattcctatgatctccgcagtttggtgtctcagttatttaaaagaaatcctagggatagaccatcagtcaactccatattggagaaaggttttatagccaaacgcattgaaaagtttctctctcctcagcttattgcagaagaattttgtctaaaaacattttcgaagtttggatcacagcctataccagctaaaagaccagcttcaggacaaaactcgatttctgttatgcctgctcagaaaattacaaagcctgccgctaaatatggaatacctttagcatataagaaatatggagataaaaaattacacgaaaagaaaccactgcaaaaacataaacaggcccatcaaactccagagaagagagtgaatactggagaagaaaggaggaaaatatctgaggaagcagcaagaaagagaaggctggaatttattgaaaaagaaaagaaacaaaaggatcagattattagtttaatgaaggctgaacaaatgaaaaggcaagaaaaggaaaggttggaaagaataaatagggccagggaacaaggatggagaaatgtgctaagtgctggtggaagtggtgaagtaaaggctccttttctgggcagtggagggactatagctccatcatctttttcttctcgaggacagtatgaacattaccatgccatttttgaccaaatgcagcaacaaagagcagaagataatgaagctaaatggaaaagagaaatatatggtcgaggtcttccagaaaggcaaaaagggcagctagctgtagaaagagctaaacaagtagaagagttcctgcagcgaaaacgggaagctatgcagaataaagctcgagccgaaggacatatggtttatctggcaagactgaggcaaataagactacagaatttcaatgagcgccaacagattaaagccaaacttcgtggtgaaaagaaagaagctaatcattctgaaggacaagaaggaagtgaagaggctgacatgaggcgcaaaaaaatcgaatcactgaaggcccatgcaaatgcacgtgctgctgtactaaaagaacaactagaacgaaagagaaaggaggcttatgagagagaaaaaaaagtgtgggaagagcatttggtggctaaaggagttaagagttctgatgtttctccacctttgggacagcatgaaacaggtggctctccatcaaagcaacagatgagatctgttatttctgtaacttcagctttgaaagaagttggcgtggacagtagtttaactgatacccgggaaacttcagaagagatgcaaaagaccaacaatgctatttcaagtaagcgagaaatacttcgcagattaaatgaaaatcttaaagctcaagaagatgaaaaaggaatgcagaatctctctgatacttttgagataaatgttcatgaagatgccaaagagcatgaaaaagaaaaatcagtttcatctgatcgcaagaagtgggaggcaggaggtcaacttgtgattcctctggatgagttaacactagatacatccttctctacaactgaaagacatacagtgggagaagttattaaattaggtcctaatggatctccaagaagagcctgggggaaaagtccgacagattctgttctaaagatacttggagaagctgaactacaacttcagacagaactattagaaaatacaactattagaagtgagatttctcccgaaggggaaaagtacaaacccttaattactggagaaaaaaaagtacaatgtatttcacatgaaataaacccatcagctattgttgattctcctgttgagacaaaaagtcccgagttcagtgaggcatctccacagatgtcattgaaactggaaggaaatttagaagaacctgatgatttggaaacagaaattctacaagagccaagtggaacaaacaaagatgagagcttgccatgcactattactgatgtgtggattagtgaggaaaaagaaacaaaggaaactcagtcggcagataggatcaccattcaggaaaatgaagtttctgaagatggagtctcgagtactgtggaccaacttagtgacattcatatagagcctggaaccaatgattctcagcactctaaatgtgatgtagataagtctgtgcaaccggaaccatttttccataaggtggttcattctgaacacttgaacttagtccctcaagttcaatcagttcagtgttcaccagaagaatcctttgcatttcgatctcactcgcatttaccaccaaaaaataaaaacaagaattccttgctgattggactttcaactggtctgtttgatgcaaacaacccaaagatgttaaggacatgttcacttccagatctctcaaagctgttcagaacccttatggatgttcccaccgtaggagatgttcgtcaagacaatcttgaaatagatgaaattaaagatgaaaacattaaagaaggaccttctgattctgaagacattgtgtttgaagaaactgacacagatttacaagagctgcaggcctcgatggaacagttacttagggaacaacctggtgaagaatacagtgaagaagaagagtcagtcttgaagaacagtgatgtggagccaactgcaaatgggacagatgtggcagatgaagatgacaatcccagtagtgaaagtgccctgaacgaagaatggcactcagataacagtgatggtgaaattgctagtgaatgtgaatgcgatagtgtctttaaccatttagaggaactgagacttcatctggagcaggaaatgggctttgaaaaattctttgaggtttatgagaaaataaaggctattcatgaagatgaagatgaaaatattgaaatttgttcaaaaatagttcaaaatattttgggaaatgaacatcagcatctttatgccaagattcttcatttagtcatggcagatggagcctaccaagaagataatgatgaataa

SEQ ID NO: 29 - protein, 1007 aa, Homo Sapiens
MKNLVLKIISGSFPPVSLHYSYDLRSLVSQLFKRNPRDRPSVNSILEKGFIAKRIEKFLSPQLIAEEFCLKTFSKFGSQPIPAKRPASGQNSISVMPAQKITKPAAKYGIPLAYKKYGDKKLHEKKPLQKHKQAHQTPEKRVNTGEERRKISEEAARKRRLEFIEKEKKQKDQIISLMKAEQMKRQEKERLERINRAREQGWRNVLSAGGSGEVKAPFLGSGGTIAPSSFSSRGQYEHYHAIFDQMQQQRAEDNEAKWKREIYGRGLPERQKGQLAVERAKQVEEFLQRKREAMQNKARAEGHMVYLARLRQIRLQNFNERQQIKAKLRGEKKEANHSEGQEGSEEADMRRKKIESLKAHANARAAVLKEQLERKRKEAYEREKKVWEEHLVAKGVKSSDVSPPLGQHETGGSPSKQQMRSVISVTSALKEVGVDSSLTDTRETSEEMQKTNNAISSKREILRRLNENLKAQEDEKGMQNLSDTFEINVHEDAKEHEKEKSVSSDRKKWEAGGQLVIPLDELTLDTSFSTTERHTVGEVIKLGPNGSPRRAWGKSPTDSVLKILGEAELQLQTELLENTTIRSEISPEGEKYKPLITGEKKVQCISHEINPSAIVDSPVETKSPEFSEASPQMSLKLEGNLEEPDDLETEILQEPSGTNKDESLPCTITDVWISEEKETKETQSADRITIQENEVSEDGVSSTVDQLSDIHIEPGTNDSQHSKCDVDKSVQPEPFFHKVVHSEHLNLVPQVQSVQCSPEESFAFRSHSHLPPKNKNKNSLLIGLSTGLFDANNPKMLRTCSLPDLSKLFRTLMDVPTVGDVRQDNLEIDEIKDENIKEGPSDSEDIVFEETDTDLQELQASMEQLLREQPGEEYSEEEESVLKNSDVEPTANGTDVADEDDNPSSESALNEEWHSDNSDGEIASECECDSVFNHLEELRLHLEQEMGFEKFFEVYEKIKAIHEDEDENIEICSKIVQNILGNEHQHLYAKILHLVMADGAYQEDNDE

SEQ ID NO: 30 - DNA, 891 bp, Homo Sapiens
  CDS (1)...(891)
atgccagctttgtcaacgggatctgggagtgacactggtctgtatgagctgttggctgctctgccagcccagctgcagccacatgtggatagccaggaagacctgaccttcctctgggatatgtttggtgaaaaaagcctgcattcattggtaaagattcatgaaaaactacactactatgagaagcagagtccggtgcccattctccatggtgcggcggccttggccgatgatctggccgaagagcttcagaacaagccattaaacagtgagatcagagagctgttgaaactactgtcaaaacccaatgtgaaggctttgctctctgtacatgatactgtggctcagaagaattacgacccagtgttgcctcctatgcctgaagatattgacgatgaggaagactcagtaaaaataatccgtctggtcaaaaatagagaaccactgggagctaccattaagaaggatgaacagaccggggcgatcattgtggccagaatcatgagaggaggagctgcagatagaagtggtcttattcatgttggtgatgaacttagggaagtcaacgggataccagtggaggataaaaggcctgaggaaataatacagattttggctcagtctcagggagcaattacatttaagattatacccggcagcaaagaggagacaccatcaaaagaaggcaagatgtttatcaaagccctctttgactataatcctaatgaggataaggcaattccatgtaaggaagctgggctttctttcaaaaagggagatattcttcagattatgagccaagatgatgcaacttggtggcaagcgaaacacgaagctgatgccaaccccagggcaggcttgatcccctcaaagcatttccaggaaaggtga

SEQ ID NO: 31 - protein, 296 aa, Homo Sapiens
MPALSTGSGSDTGLYELLAALPAQLQPHVDSQEDLTFLWDMFGEKSLHSLVKIHEKLHYYEKQSPVPILHGAAALADDLAEELQNKPLNSEIRELLKLLSKPNVKALLSVHDTVAQKNYDPVLPPMPEDIDDEEDSVKIIRLVKNREPLGATIKKDEQTGAIIVARIMRGGAADRSGLIHVGDELREVNGIPVEDKRPEEIIQILAQSQGAITFKIIPGSKEETPSKEGKMFIKALFDYNPNEDKAIPCKEAGLSFKKGDILQIMSQDDATWWQAKHEADANPRAGLIPSKHFQER

SEQ ID NO: 32 - DNA, 219 bp, Homo Sapiens
  CDS (1)...(219)
atgaaacttttcttccagatgtttatcaaagccctctttgactataatcctaatgaggataaggcaattccatgtaaggaagctgggctttctttcaaaaagggagatattcttcagattatgagccaagatgatgcaacttggtggcaagcgaaacacgaagctgatgccaaccccagggcaggcttgatcccctcaaagcatttccaggaaaggtga

SEQ ID NO: 33 - protein, 72 aa, Homo Sapiens [sequence omitted]

SEQ ID NO: 34 - DNA, 957 bp, Homo Sapiens
  CDS (1)...(957)
atgccagctttgtcaacgggatctgggagtgacactggtctgtatgagctgttggctgctctgccagcccagctgcagccacatgtggatagccaggaagacctgaccttcctctgggatatgtttggtgaaaaaagcctgcattcattggtaaagattcatgaaaaactacactactatgagaagcagagtccggtgcccattctccatggtgcggcggccttggccgatgatctggccgaagagcttcagaacaagccattaaacagtgagatcagagagctgttgaaactactgtcaaaacccaatgtgaaggctttgctctctgtacatgatactgtggctcagaagaattacgacccagtgttgcctcctatgcctgaagatattgacgatgaggaagactcagtaaaaataatccgtctggtcaaaaatagagaaccactgggagctaccattaagaaggatgaacagaccggggcgatcattgtggccagaatcatgagaggaggagctgcagatagaagtggtcttattcatgttggtgatgaacttagggaagtcaacgggataccagtggaggataaaaggcctgaggaaataatacagattttggctcagtctcagggagcaattacatttaagattatacccggcagcaaagaggagacaccatcaaaagaaggcaagatgtttatcaaagccctctttgactataatcctaatgaggataaggcaattccatgtaaggaagctgggctttctttcaaaaagggagatattcttcagattatgagccaagatgatgcaacttggtggcaagcgaaacacgaagctgatgccaaccccagggcaggcttgatcccctcaaagcatttccaggaaaggagattggctttgagacgaccagaaatattggttcagcccctgaaagtttccaacaggaaatcatcctaa

SEQ ID NO: 35 - protein, 318 aa, Homo Sapiens
MPALSTGSGSDTGLYELLAALPAQLQPHVDSQEDLTFLWDMFGEKSLHSLVKIHEKLHYYEKQSPVPILHGAAALADDLAEELQNKPLNSEIRELLKLLSKPNVKALLSVHDTVAQKNYDPVLPPMPEDIDDEEDSVKIIRLVKNREPLGATIKKDEQTGAIIVARIMRGGAADRSGLIHVGDELREVNGIPVEDKRPEEIIQILAQSQGAITFKIIPGSKEETPSKEGKMFIKALFDYNPNEDKAIPCKEAGLSFKKGDILQIMSQDDATWWQAKHEADANPRAGLIPSKHFQERRLALRRPEILVQPLKVSNRKSS

SEQ ID NO: 36 - DNA, 285 bp, Homo Sapiens
  CDS (1)...(285)
atgaaacttttcttccagatgtttatcaaagccctctttgactataatcctaatgaggataaggcaattccatgtaaggaagctgggctttctttcaaaaagggagatattcttcagattatgagccaagatgatgcaacttggtggcaagcgaaacacgaagctgatgccaaccccagggcaggcttgatcccctcaaagcatttccaggaaaggagattggctttgagacgaccagaaatattggttcagcccctgaaagtttccaacaggaaatcatcctaa

SEQ ID NO: 37 - protein, 94 aa, Homo Sapiens
MKLFFQMFIKALFDYNPNEDKAIPCKEAGLSFKKGDILQIMSQDDATWWQAKHEADANPRAGLIPSKHFQERRLALRRPEILVQPLKVSNRKSS

SEQ ID NO: 38 - DNA, 327 bp, Homo Sapiens
  CDS (1)...(327)
atgtgctgcccaaagactgcttgcagaggtcccgtgggagtagggctgaatgaactgaaacgaaagctgctgatcagtgacacccagcactatggcgtgacagtgccccataccaccagagcaagaagaagccaggagagtgatggtgttgaatacattttcatttccaagcatttgtttgagacagatgtacaaaataacaagtttattgaatatggagaatataaaaacaactactacggcacaagtatagactcagttcggtctgtccttgctaaaaacaaagtttgtttgttggatgttcagcctcatgtaagtaaacaatga

SEQ ID NO: 39 - protein, 108 aa, Homo Sapiens
MCCPKTACRGPVGVGLNELKRKLLISDTQHYGVTVPHTTRARRSQESDGVEYIFISKHLFETDVQNNKFIEYGEYKNNYYGTSIDSVRSVLAKNKVCLLDVQPHVSKQ

SEQ ID NO: 40 - DNA, 1128 bp, Homo Sapiens
  CDS (1)...(1128)
atgccagctttgtcaacgggatctgggagtgacactggtctgtatgagctgttggctgctctgccagcccagctgcagccacatgtggatagccaggaagacctgaccttcctctgggatatgtttggtgaaaaaagcctgcattcattggtaaagattcatgaaaaactacactactatgagaagcagagtccggtgcccattctccatggtgcggcggccttggccgatgatctggccgaagagcttcagaacaagccattaaacagtgagatcagagagctgttgaaactactgtcaaaacccaatgtgaaggctttgctctctgtacatgatactgtggctcagaagaattacgacccagtgttgcctcctatgcctgaagatattgacgatgaggaagactcagtaaaaataatccgtctggtcaaaaatagagaaccactgggagctaccattaagaaggatgaacagaccggggcgatcattgtggccagaatcatgagaggaggagctgcagatagaagtggtcttattcatgttggtgatgaacttagggaagtcaacgggataccagtggaggataaaaggcctgaggaaataatacagattttggctcagtctcagggagcaattacatttaagattatacccggcagcaaagaggagacaccatcaaaagaaggcaagatgtttatcaaagccctctttgactataatcctaatgaggataaggcaattccatgtaaggaagctgggctttctttcaaaaagggagatattcttcagattatgagccaagatgatgcaacttggtggcaagcgaaacacgaagctgatgccaaccccagggcaggcttgatcccctcaaagcatttccaggaaaggagattggctttgagacgaccagaaatattggttcagcccctgaaagtttccaacaggaaatcatctggttttagaagaagttttcgtcttagtagaaaagataagaaaacaaataaatccatgtatgaatgcaagaagagtgatcagtacgacacagctgacgtacccacatacgaagaagtgacaccgtatcggcgacaaactaatgaaaaatacagactcgttgtcttggttgcttga

SEQ ID NO: 41 - protein, 375 aa, Homo Sapiens [sequence omitted]

SEQ ID NO: 42 - DNA, 414 bp, Homo Sapiens
  CDS (1)...(414)
atgtatgaatgcaagaagagtgatcagtacgacacagctgacgtacccacatacgaagaagtgacaccgtatcggcgacaaactaatgaaaaatacagactcgttgtcttggttggtcccgtgggagtagggctgaatgaactgaaacgaaagctgctgatcagtgacacccagcactatggcgtgacagtgccccataccaccagagcaagaagaagccaggagagtgatggtgttgaatacattttcatttccaagcatttgtttgagacagatgtacaaaataacaagtttattgaatatggagaatataaaaacaactactacggcacaagtatagactcagttcggtctgtccttgctaaaaacaaagtttgtttgttggatgttcagcctcatgtaagtaaacaatga

SEQ ID NO: 43 - protein, 137 aa, Homo Sapiens
MYECKKSDQYDTADVPTYEEVTPYRRQTNEKYRLVVLVGPVGVGLNELKRKLLISDTQHYGVTVPHTTRARRSQESDGVEYIFISKHLFETDVQNNKFIEYGEYKNNYYGTSIDSVRSVLAKNKVCLLDVQPHVSKQ

SEQ ID NO: 44 - DNA, 1422 bp, Homo Sapiens
  CDS (1)...(1422)
atgccagctttgtcaacgggatctgggagtgacactggtctgtatgagctgttggctgctctgccagcccagctgcagccacatgtggatagccaggaagacctgaccttcctctgggatatgtttggtgaaaaaagcctgcattcattggtaaagattcatgaaaaactacactactatgagaagcagagtccggtgcccattctccatggtgcggcggccttggccgatgatctggccgaagagcttcagaacaagccattaaacagtgagatcagagagctgttgaaactactgtcaaaacccaatgtgaaggctttgctctctgtacatgatactgtggctcagaagaattacgacccagtgttgcctcctatgcctgaagatattgacgatgaggaagactcagtaaaaataatccgtctggtcaaaaatagagaaccactgggagctaccattaagaaggatgaacagaccggggcgatcattgtggccagaatcatgagaggaggagctgcagatagaagtggtcttattcatgttggtgatgaacttagggaagtcaacgggataccagtggaggataaaaggcctgaggaaataatacagattttggctcagtctcagggagcaattacatttaagattatacccggcagcaaagaggagacaccatcaaaagaaggcaagatgtttatcaaagccctctttgactataatcctaatgaggataaggcaattccatgtaaggaagctgggctttctttcaaaaagggagatattcttcagattatgagccaagatgatgcaacttggtggcaagcgaaacacgaagctgatgccaaccccagggcaggcttgatcccctcaaagcatttccaggaaaggagattggctttgagacgaccagaaatattggttcagcccctgaaagtttccaacaggaaatcatctggttttagaagaagttttcgtcttagtagaaaagataagaaaacaaataaatccatgtatgaatgcaagaagagtgatcagtacgacacagctgacgtacccacatacgaagaagtgacaccgtatcggcgacaaactaatgaaaaatacagactcgttgtcttggttggtcccgtgggagtagggctgaatgaactgaaacgaaagctgctgatcagtgacacccagcactatggcgtgacagtgccccataccaccagagcaagaagaagccaggagagtgatggtgttgaatacattttcatttccaagcatttgtttgagacagatgtacaaaataacaagtttattgaatatggagaatataaaaacaactactacggcacaagtatagactcagttcggtctgtccttgctaaaaacaaagtttgtttgttggatgttcagcctcatgtaagtaaacaatga

SEQ ID NO: 45 - protein, 473 aa, Homo Sapiens [sequence omitted]

SEQ ID NO: 46 - DNA, 750 bp, Homo Sapiens
  CDS (1)...(750)
atgaaacttttcttccagatgtttatcaaagccctctttgactataatcctaatgaggataaggcaattccatgtaaggaagctgggctttctttcaaaaagggagatattcttcagattatgagccaagatgatgcaacttggtggcaagcgaaacacgaagctgatgccaaccccagggcaggcttgatcccctcaaagcatttccaggaaaggagattggctttgagacgaccagaaatattggttcagcccctgaaagtttccaacaggaaatcatctggttttagaagaagttttcgtcttagtagaaaagataagaaaacaaataaatccatgtatgaatgcaagaagagtgatcagtacgacacagctgacgtacccacatacgaagaagtgacaccgtatcggcgacaaactaatgaaaaatacagactcgttgtcttggttggtcccgtgggagtagggctgaatgaactgaaacgaaagctgctgatcagtgacacccagcactatggcgtgacagtgccccataccaccagagcaagaagaagccaggagagtgatggtgttgaatacattttcatttccaagcatttgtttgagacagatgtacaaaataacaagtttattgaatatggagaatataaaaacaactactacggcacaagtatagactcagttcggtctgtccttgctaaaaacaaagtttgtttgttggatgttcagcctcatgtaagtaaacaatga

SEQ ID NO: 47 - protein, 249 aa, Homo Sapiens
MKLFFQMFIKALFDYNPNEDKAIPCKEAGLSFKKGDILQIMSQDDATWWQAKHEADANPRAGLIPSKHFQERRLALRRPEILVQPLKVSNRKSSGFRRSFRLSRKDKKTNKSMYECKKSDQYDTADVPTYEEVTPYRRQTNEKYRLVVLVGPVGVGLNELKRKLLISDTQHYGVTVPHTTRARRSQESDGVEYIFISKHLFETDVQNNKFIEYGEYKNNYYGTSIDSVRSVLAKNKVCLLDVQPHVSKQ

SEQ ID NO: 48 - DNA, 468 bp, Homo Sapiens
  CDS (1)...(468)
atgtgctgcccaaagactgcttgcagaggtcccgtgggagtagggctgaatgaactgaaacgaaagctgctgatcagtgacacccagcactatggcgtgacagtgccccataccaccagagcaagaagaagccaggagagtgatggtgttgaatacattttcatttccaagcatttgtttgagacagatgtacaaaataacaagtttattgaatatggagaatataaaaacaactactacggcacaagtatagactcagttcggtctgtccttgctaaaaacaaagtttgtttgttggatgttcagcctcatacagtgaagcatttaaggacactagaatttaagccctatgtgatatttataaagcctccatcaatagagcgtttgagagaaacaagaaaaaatgcaaagattatttcaagcagagatgaccaaggtgctgcaaaacccttcacacaaggagaatag

SEQ ID NO: 49 - protein, 155 aa, Homo Sapiens
MCCPKTACRGPVGVGLNELKRKLLISDTQHYGVTVPHTTRARRSQESDGVEYIFISKHLFETDVQNNKFIEYGEYKNNYYGTSIDSVRSVLAKNKVCLLDVQPHTVKHLRTLEFKPYVIFIKPPSIERLRETRKNAKIISSRDDQGAAKPFTQGE

SEQ ID NO: 50 - DNA, 555 bp, Homo Sapiens
  CDS (1)...(555)
atgtatgaatgcaagaagagtgatcagtacgacacagctgacgtacccacatacgaagaagtgacaccgtatcggcgacaaactaatgaaaaatacagactcgttgtcttggttggtcccgtgggagtagggctgaatgaactgaaacgaaagctgctgatcagtgacacccagcactatggcgtgacagtgccccataccaccagagcaagaagaagccaggagagtgatggtgttgaatacattttcatttccaagcatttgtttgagacagatgtacaaaataacaagtttattgaatatggagaatataaaaacaactactacggcacaagtatagactcagttcggtctgtccttgctaaaaacaaagtttgtttgttggatgttcagcctcatacagtgaagcatttaaggacactagaatttaagccctatgtgatatttataaagcctccatcaatagagcgtttgagagaaacaagaaaaaatgcaaagattatttcaagcagagatgaccaaggtgctgcaaaacccttcacacaaggagaatag

SEQ ID NO: 51 - protein, 184 aa, Homo Sapiens
MYECKKSDQYDTADVPTYEEVTPYRRQTNEKYRLVVLVGPVGVGLNELKRKLLISDTQHYGVTVPHTTRARRSQESDGVEYIFISKHLFETDVQNNKFIEYGEYKNNYYGTSIDSVRSVLAKNKVCLLDVQPHTVKHLRTLEFKPYVIFIKPPSIERLRETRKNAKIISSRDDQGAAKPFTQGE

SEQ ID NO: 52 - DNA, 1563 bp, Homo Sapiens
  CDS (1)...(1563)
atgccagctttgtcaacgggatctgggagtgacactggtctgtatgagctgttggctgctctgccagcccagctgcagccacatgtggatagccaggaagacctgaccttcctctgggatatgtttggtgaaaaaagcctgcattcattggtaaagattcatgaaaaactacactactatgagaagcagagtccggtgcccattctccatggtgcggcggccttggccgatgatctggccgaagagcttcagaacaagccattaaacagtgagatcagagagctgttgaaactactgtcaaaacccaatgtgaaggctttgctctctgtacatgatactgtggctcagaagaattacgacccagtgttgcctcctatgcctgaagatattgacgatgaggaagactcagtaaaaataatccgtctggtcaaaaatagagaaccactgggagctaccattaagaaggatgaacagaccggggcgatcattgtggccagaatcatgagaggaggagctgcagatagaagtggtcttattcatgttggtgatgaacttagggaagtcaacgggataccagtggaggataaaaggcctgaggaaataatacagattttggctcagtctcagggagcaattacatttaagattatacccggcagcaaagaggagacaccatcaaaagaaggcaagatgtttatcaaagccctctttgactataatcctaatgaggataaggcaattccatgtaaggaagctgggctttctttcaaaaagggagatattcttcagattatgagccaagatgatgcaacttggtggcaagcgaaacacgaagctgatgccaaccccagggcaggcttgatcccctcaaagcatttccaggaaaggagattggctttgagacgaccagaaatattggttcagcccctgaaagtttccaacaggaaatcatctggttttagaagaagttttcgtcttagtagaaaagataagaaaacaaataaatccatgtatgaatgcaagaagagtgatcagtacgacacagctgacgtacccacatacgaagaagtgacaccgtatcggcgacaaactaatgaaaaatacagactcgttgtcttggttggtcccgtgggagtagggctgaatgaactgaaacgaaagctgctgatcagtgacacccagcactatggcgtgacagtgccccataccaccagagcaagaagaagccaggagagtgatggtgttgaatacattttcatttccaagcatttgtttgagacagatgtacaaaataacaagtttattgaatatggagaatataaaaacaactactacggcacaagtatagactcagttcggtctgtccttgctaaaaacaaagtttgtttgttggatgttcagcctcatacagtgaagcatttaaggacactagaatttaagccctatgtgatatttataaagcctccatcaatagagcgtttgagagaaacaagaaaaaatgcaaagattatttcaagcagagatgaccaaggtgctgcaaaacccttcacacaaggagaatag

SEQ ID NO: 53 - protein, 520 aa, Homo Sapiens
MPALSTGSGSDTGLYELLAALPAQLQPHVDSQEDLTFLWDMFGEKSLHSLVKIHEKLHYYEKQSPVPILHGAAALADDLAEELQNKPLNSEIRELLKLLSKPNVKALLSVHDTVAQKNYDPVLPPMPEDIDDEEDSVKIIRLVKNREPLGATIKKDEQTGAIIVARIMRGGAADRSGLIHVGDELREVNGIPVEDKRPEEIIQILAQSQGAITFKIIPGSKEETPSKEGKMFIKALFDYNPNEDKAIPCKEAGLSFKKGDILQIMSQDDATWWQAKHEADANPRAGLIPSKHFQERRLALRRPEILVQPLKVSNRKSSGFRRSFRLSRKDKKTNKSMYECKKSDQYDTADVPTYEEVTPYRRQTNEKYRLVVLVGPVGVGLNELKRKLLISDTQHYGVTVPHTTRARRSQESDGVEYIFISKHLFETDVQNNKFIEYGEYKNNYYGTSIDSVRSVLAKNKVCLLDVQPHTVKHLRTLEFKPYVIFIKPPSIERLRETRKNAKIISSRDDQGAAKPFTQGE

SEQ ID NO: 54 - DNA, 891 bp, Homo Sapiens
  CDS (1)...(891)
atgaaacttttcttccagatgtttatcaaagccctctttgactataatcctaatgaggataaggcaattccatgtaaggaagctgggctttctttcaaaaagggagatattcttcagattatgagccaagatgatgcaacttggtggcaagcgaaacacgaagctgatgccaaccccagggcaggcttgatcccctcaaagcatttccaggaaaggagattggctttgagacgaccagaaatattggttcagcccctgaaagtttccaacaggaaatcatctggttttagaagaagttttcgtcttagtagaaaagataagaaaacaaataaatccatgtatgaatgcaagaagagtgatcagtacgacacagctgacgtacccacatacgaagaagtgacaccgtatcggcgacaaactaatgaaaaatacagactcgttgtcttggttggtcccgtgggagtagggctgaatgaactgaaacgaaagctgctgatcagtgacacccagcactatggcgtgacagtgccccataccaccagagcaagaagaagccaggagagtgatggtgttgaatacattttcatttccaagcatttgtttgagacagatgtacaaaataacaagtttattgaatatggagaatataaaaacaactactacggcacaagtatagactcagttcggtctgtccttgctaaaaacaaagtttgtttgttggatgttcagcctcatacagtgaagcatttaaggacactagaatttaagccctatgtgatatttataaagcctccatcaatagagcgtttgagagaaacaagaaaaaatgcaaagattatttcaagcagagatgaccaaggtgctgcaaaacccttcacacaaggagaatag

SEQ ID NO: 55 - protein, 296 aa, Homo Sapiens
MKLFFQMFIKALFDYNPNEDKAIPCKEAGLSFKKGDILQIMSQDDATWWQAKHEADANPRAGLIPSKHFQERRLALRRPEILVQPLKVSNRKSSGFRRSFRLSRKDKKTNKSMYECKKSDQYDTADVPTYEEVTPYRRQTNEKYRLVVLVGPVGVGLNELKRKLLISDTQHYGVTVPHTTRARRSQESDGVEYIFISKHLFETDVQNNKFIEYGEYKNNYYGTSIDSVRSVLAKNKVCLLDVQPHTVKHLRTLEFKPYVIFIKPPSIERLRETRKNAKIISSRDDQGAAKPFTQGE

SEQ ID NO: 56 - DNA, 585 bp, Homo Sapiens
  CDS (1)...(585)
atgtgctgcccaaagactgcttgcagaggtcccgtgggagtagggctgaatgaactgaaacgaaagctgctgatcagtgacacccagcactatggcgtgacagtgccccataccaccagagcaagaagaagccaggagagtgatggtgttgaatacattttcatttccaagcatttgtttgagacagatgtacaaaataacaagtttattgaatatggagaatataaaaacaactactacggcacaagtatagactcagttcggtctgtccttgctaaaaacaaagtttgtttgttggatgttcagcctcatacagtgaagcatttaaggacactagaatttaagccctatgtgatatttataaagcctccatcaatagagcgtttgagagaaacaagaaaaaatgcaaagattatttcaagcagagatgaccaaggtgctgcaaaacccttcacagaagaagattttcaagaaatgattaaatctgcacagataatggaaagtcaatatggtcatctttttgacaaaattataataaatgatgacctcactgtggcattcaaaaaaaaaaaaaaaaaaaaaaaa

SEQ ID NO: 57 - protein, 195 aa, Homo Sapiens
MCCPKTACRGPVGVGLNELKRKLLISDTQHYGVTVPHTTRARRSQESDGVEYIFISKHLFETDVQNNKFIEYGEYKNNYYGTSIDSVRSVLAKNKVCLLDVQPHTVKHLRTLEFKPYVIFIKPPSIERLRETRKNAKIISSRDDQGAAKPFTEEDFQEMIKSAQIMESQYGHLFDKIIINDDLTVAFKKKKKKKK

SEQ ID NO: 58 - DNA, 672 bp, Homo Sapiens
  CDS (1)...(672)
atgtatgaatgcaagaagagtgatcagtacgacacagctgacgtacccacatacgaagaagtgacaccgtatcggcgacaaactaatgaaaaatacagactcgttgtcttggttggtcccgtgggagtagggctgaatgaactgaaacgaaagctgctgatcagtgacacccagcactatggcgtgacagtgccccataccaccagagcaagaagaagccaggagagtgatggtgttgaatacattttcatttccaagcatttgtttgagacagatgtacaaaataacaagtttattgaatatggagaatataaaaacaactactacggcacaagtatagactcagttcggtctgtccttgctaaaaacaaagtttgtttgttggatgttcagcctcatacagtgaagcatttaaggacactagaatttaagccctatgtgatatttataaagcctccatcaatagagcgtttgagagaaacaagaaaaaatgcaaagattatttcaagcagagatgaccaaggtgctgcaaaacccttcacagaagaagattttcaagaaatgattaaatctgcacagataatggaaagtcaatatggtcatctttttgacaaaattataataaatgatgacctcactgtggcattcaaaaaaaaaaaaaaaaaaaaaaaa

SEQ ID NO: 59 - protein, 224 aa, Homo Sapiens
MYECKKSDQYDTADVPTYEEVTPYRRQTNEKYRLVVLVGPVGVGLNELKRKLLISDTQHYGVTVPHTTRARRSQESDGVEYIFISKHLFETDVQNNKFIEYGEYKNNYYGTSIDSVRSVLAKNKVCLLDVQPHTVKHLRTLEFKPYVIFIKPPSIERLRETRKNAKIISSRDDQGAAKPFTEEDFQEMIKSAQIMESQYGHLFDKIIINDDLTVAFKKKKKKKK

SEQ ID NO: 60 - DNA, 1680 bp, Homo Sapiens
  CDS (1)...(1680)
atgccagctttgtcaacgggatctgggagtgacactggtctgtatgagctgttggctgctctgccagcccagctgcagccacatgtggatagccaggaagacctgaccttcctctgggatatgtttggtgaaaaaagcctgcattcattggtaaagattcatgaaaaactacactactatgagaagcagagtccggtgcccattctccatggtgcggcggccttggccgatgatctggccgaagagcttcagaacaagccattaaacagtgagatcagagagctgttgaaactactgtcaaaacccaatgtgaaggctttgctctctgtacatgatactgtggctcagaagaattacgacccagtgttgcctcctatgcctgaagatattgacgatgaggaagactcagtaaaaataatccgtctggtcaaaaatagagaaccactgggagctaccattaagaaggatgaacagaccggggcgatcattgtggccagaatcatgagaggaggagctgcagatagaagtggtcttattcatgttggtgatgaacttagggaagtcaacgggataccagtggaggataaaaggcctgaggaaataatacagattttggctcagtctcagggagcaattacatttaagattatacccggcagcaaagaggagacaccatcaaaagaaggcaagatgtttatcaaagccctctttgactataatcctaatgaggataaggcaattccatgtaaggaagctgggctttctttcaaaaagggagatattcttcagattatgagccaagatgatgcaacttggtggcaagcgaaacacgaagctgatgccaaccccagggcaggcttgatcccctcaaagcatttccaggaaaggagattggctttgagacgaccagaaatattggttcagcccctgaaagtttccaacaggaaatcatctggttttagaagaagttttcgtcttagtagaaaagataagaaaacaaataaatccatgtatgaatgcaagaagagtgatcagtacgacacagctgacgtacccacatacgaagaagtgacaccgtatcggcgacaaactaatgaaaaatacagactcgttgtcttggttggtcccgtgggagtagggctgaatgaactgaaacgaaagctgctgatcagtgacacccagcactatggcgtgacagtgccccataccaccagagcaagaagaagccaggagagtgatggtgttgaatacattttcatttccaagcatttgtttgagacagatgtacaaaataacaagtttattgaatatggagaatataaaaacaactactacggcacaagtatagactcagttcggtctgtccttgctaaaaacaaagtttgtttgttggatgttcagcctcatacagtgaagcatttaaggacactagaatttaagccctatgtgatatttataaagcctccatcaatagagcgtttgagagaaacaagaaaaaatgcaaagattatttcaagcagagatgaccaaggtgctgcaaaacccttcacagaagaagattttcaagaaatgattaaatctgcacagataatggaaagtcaatatggtcatctttttgacaaaattataataaatgatgacctcactgtggcattcaaaaaaaaaaaaaaaaaaaaaaaa

SEQ ID NO: 61 - protein, 560 aa, Homo Sapiens
MPALSTGSGSDTGLYELLAALPAQLQPHVDSQEDLTFLWDMFGEKSLHSLVKIHEKLHYYEKQSPVPILHGAAALADDLAEELQNKPLNSEIRELLKLLSKPNVKALLSVHDTVAQKNYDPVLPPMPEDIDDEEDSVKIIRLVKNREPLGATIKKDEQTGAIIVARIMRGGAADRSGLIHVGDELREVNGIPVEDKRPEEIIQILAQSQGAITFKIIPGSKEETPSKEGKMFIKALFDYNPNEDKAIPCKEAGLSFKKGDILQIMSQDDATWWQAKHEADANPRAGLIPSKHFQERRLALRRPEILVQPLKVSNRKSSGFRRSFRLSRKDKKTNKSMYECKKSDQYDTADVPTYEEVTPYRRQTNEKYRLVVLVGPVGVGLNELKRKLLISDTQHYGVTVPHTTRARRSQESDGVEYIFISKHLFETDVQNNKFIEYGEYKNNYYGTSIDSVRSVLAKNKVCLLDVQPHTVKHLRTLEFKPYVIFIKPPSIERLRETRKNAKIISSRDDQGAAKPFTEEDFQEMIKSAQIMESQYGHLFDKIIINDDLTVAFKKKKKKKK

SEQ ID NO: 62 - DNA, 1008 bp, Homo Sapiens
  CDS (1)...(1008)
atgaaacttttcttccagatgtttatcaaagccctctttgactataatcctaatgaggataaggcaattccatgtaaggaagctgggctttctttcaaaaagggagatattcttcagattatgagccaagatgatgcaacttggtggcaagcgaaacacgaagctgatgccaaccccagggcaggcttgatcccctcaaagcatttccaggaaaggagattggctttgagacgaccagaaatattggttcagcccctgaaagtttccaacaggaaatcatctggttttagaagaagttttcgtcttagtagaaaagataagaaaacaaataaatccatgtatgaatgcaagaagagtgatcagtacgacacagctgacgtacccacatacgaagaagtgacaccgtatcggcgacaaactaatgaaaaatacagactcgttgtcttggttggtcccgtgggagtagggctgaatgaactgaaacgaaagctgctgatcagtgacacccagcactatggcgtgacagtgccccataccaccagagcaagaagaagccaggagagtgatggtgttgaatacattttcatttccaagcatttgtttgagacagatgtacaaaataacaagtttattgaatatggagaatataaaaacaactactacggcacaagtatagactcagttcggtctgtccttgctaaaaacaaagtttgtttgttggatgttcagcctcatacagtgaagcatttaaggacactagaatttaagccctatgtgatatttataaagcctccatcaatagagcgtttgagagaaacaagaaaaaatgcaaagattatttcaagcagagatgaccaaggtgctgcaaaacccttcacagaagaagattttcaagaaatgattaaatctgcacagataatggaaagtcaatatggtcatctttttgacaaaattataataaatgatgacctcactgtggcattcaaaaaaaaaaaaaaaaaaaaaaaa

SEQ ID NO: 63 - protein, 336 aa, Homo Sapiens
MKLFFQMFIKALFDYNPNEDKAIPCKEAGLSFKKGDILQIMSQDDATWWQAKHEADANPRAGLIPSKHFQERRLALRRPEILVQPLKVSNRKSSGFRRSFRLSRKDKKTNKSMYECKKSDQYDTADVPTYEEVTPYRRQTNEKYRLVVLVGPVGVGLNELKRKLLISDTQHYGVTVPHTTRARRSQESDGVEYIFISKHLFETDVQNNKFIEYGEYKNNYYGTSIDSVRSVLAKNKVCLLDVQPHTVKHLRTLEFKPYVIFIKPPSIERLRETRKNAKIISSRDDQGAAKPFTEEDFQEMIKSAQIMESQYGHLFDKIIINDDLTVAFKKKKKKKK

SEQ ID NO: 64 - DNA, 636 bp, Homo Sapiens
  CDS (1)...(636)
atgtgctgcccaaagactgcttgcagaggtcccgtgggagtagggctgaatgaactgaaacgaaagctgctgatcagtgacacccagcactatggcgtgacagtgccccataccaccagagcaagaagaagccaggagagtgatggtgttgaatacattttcatttccaagcatttgtttgagacagatgtacaaaataacaagtttattgaatatggagaatataaaaacaactactacggcacaagtatagactcagttcggtctgtccttgctaaaaacaaagtttgtttgttggatgttcagcctcatacagtgaagcatttaaggacactagaatttaagccctatgtgatatttataaagcctccatcaatagagcgtttgagagaaacaagaaaaaatgcaaagattatttcaagcagagatgaccaaggtgctgcaaaacccttcacagaagaagattttcaagaaatgattaaatctgcacagataatggaaagtcaatatggtcatctttttgacaaaattataataaatgatgacctcactgtggcattcaatgagctcaaaacaacttttgacaaattagagacagagacccattgggtgccagtgagctggttacattcataa

SEQ ID NO: 65 - protein, 211 aa, Homo Sapiens
MCCPKTACRGPVGVGLNELKRKLLISDTQHYGVTVPHTTRARRSQESDGVEYIFISKHLFETDVQNNKFIEYGEYKNNYYGTSIDSVRSVLAKNKVCLLDVQPHTVKHLRTLEFKPYVIFIKPPSIERLRETRKNAKIISSRDDQGAAKPFTEEDFQEMIKSAQIMESQYGHLFDKIIINDDLTVAFNELKTTFDKLETETHWVPVSWLHS

SEQ ID NO: 66 - DNA, 723 bp, Homo Sapiens
  CDS (1)...(723)
atgtatgaatgcaagaagagtgatcagtacgacacagctgacgtacccacatacgaagaagtgacaccgtatcggcgacaaactaatgaaaaatacagactcgttgtcttggttggtcccgtgggagtagggctgaatgaactgaaacgaaagctgctgatcagtgacacccagcactatggcgtgacagtgccccataccaccagagcaagaagaagccaggagagtgatggtgttgaatacattttcatttccaagcatttgtttgagacagatgtacaaaataacaagtttattgaatatggagaatataaaaacaactactacggcacaagtatagactcagttcggtctgtccttgctaaaaacaaagtttgtttgttggatgttcagcctcatacagtgaagcatttaaggacactagaatttaagccctatgtgatatttataaagcctccatcaatagagcgtttgagagaaacaagaaaaaatgcaaagattatttcaagcagagatgaccaaggtgctgcaaaacccttcacagaagaagattttcaagaaatgattaaatctgcacagataatggaaagtcaatatggtcatctttttgacaaaattataataaatgatgacctcactgtggcattcaatgagctcaaaacaacttttgacaaattagagacagagacccattgggtgccagtgagctggttacattcataa

SEQ ID NO: 67 - protein, 240 aa, Homo Sapiens [sequence omitted]

SEQ ID NO: 68 - DNA, 1731 bp, Homo Sapiens
  CDS (1)...(1731)
atgccagctttgtcaacgggatctgggagtgacactggtctgtatgagctgttggctgctctgccagcccagctgcagccacatgtggatagccaggaagacctgaccttcctctgggatatgtttggtgaaaaaagcctgcattcattggtaaagattcatgaaaaactacactactatgagaagcagagtccggtgcccattctccatggtgcggcggccttggccgatgatctggccgaagagcttcagaacaagccattaaacagtgagatcagagagctgttgaaactactgtcaaaacccaatgtgaaggctttgctctctgtacatgatactgtggctcagaagaattacgacccagtgttgcctcctatgcctgaagatattgacgatgaggaagactcagtaaaaataatccgtctggtcaaaaatagagaaccactgggagctaccattaagaaggatgaacagaccggggcgatcattgtggccagaatcatgagaggaggagctgcagatagaagtggtcttattcatgttggtgatgaacttagggaagtcaacgggataccagtggaggataaaaggcctgaggaaataatacagattttggctcagtctcagggagcaattacatttaagattatacccggcagcaaagaggagacaccatcaaaagaaggcaagatgtttatcaaagccctctttgactataatcctaatgaggataaggcaattccatgtaaggaagctgggctttctttcaaaaagggagatattcttcagattatgagccaagatgatgcaacttggtggcaagcgaaacacgaagctgatgccaaccccagggcaggcttgatcccctcaaagcatttccaggaaaggagattggctttgagacgaccagaaatattggttcagcccctgaaagtttccaacaggaaatcatctggttttagaagaagttttcgtcttagtagaaaagataagaaaacaaataaatccatgtatgaatgcaagaagagtgatcagtacgacacagctgacgtacccacatacgaagaagtgacaccgtatcggcgacaaactaatgaaaaatacagactcgttgtcttggttggtcccgtgggagtagggctgaatgaactgaaacgaaagctgctgatcagtgacacccagcactatggcgtgacagtgccccataccaccagagcaagaagaagccaggagagtgatggtgttgaatacattttcatttccaagcatttgtttgagacagatgtacaaaataacaagtttattgaatatggagaatataaaaacaactactacggcacaagtatagactcagttcggtctgtccttgctaaaaacaaagtttgtttgttggatgttcagcctcatacagtgaagcatttaaggacactagaatttaagccctatgtgatatttataaagcctccatcaatagagcgtttgagagaaacaagaaaaaatgcaaagattatttcaagcagagatgaccaaggtgctgcaaaacccttcacagaagaagattttcaagaaatgattaaatctgcacagataatggaaagtcaatatggtcatctttttgacaaaattataataaatgatgacctcactgtggcattcaatgagctcaaaacaacttttgacaaattagagacagagacccattgggtgccagtgagctggttacattcataa

SEQ ID NO: 69 - protein, 576 aa, Homo Sapiens
MPALSTGSGSDTGLYELLAALPAQLQPHVDSQEDLTFLWDMFGEKSLHSLVKIHEKLHYYEKQSPVPILHGAAALADDLAEELQNKPLNSEIRELLKLLSKPNVKALLSVHDTVAQKNYDPVLPPMPEDIDDEEDSVKIIRLVKNREPLGATIKKDEQTGAIIVARIMRGGAADRSGLIHVGDELREVNGIPVEDKRPEEIIQILAQSQGAITFKIIPGSKEETPSKEGKMFIKALFDYNPNEDKAIPCKEAGLSFKKGDILQIMSQDDATWWQAKHEADANPRAGLIPSKHFQERRLALRRPEILVQPLKVSNRKSSGFRRSFRLSRKDKKTNKSMYECKKSDQYDTADVPTYEEVTPYRRQTNEKYRLVVLVGPVGVGLNELKRKLLISDTQHYGVTVPHTTRARRSQESDGVEYIFISKHLFETDVQNNKFIEYGEYKNNYYGTSIDSVRSVLAKNKVCLLDVQPHTVKHLRTLEFKPYVIFIKPPSIERLRETRKNAKIISSRDDQGAAKPFTEEDFQEMIKSAQIMESQYGHLFDKIIINDDLTVAFNELKTTFDKLETETHWVPVSWLHS

SEQ ID NO: 70 - DNA, 1059 bp, Homo Sapiens
  CDS (1)...(1059)
atgaaacttttcttccagatgtttatcaaagccctctttgactataatcctaatgaggataaggcaattccatgtaaggaagctgggctttctttcaaaaagggagatattcttcagattatgagccaagatgatgcaacttggtggcaagcgaaacacgaagctgatgccaaccccagggcaggcttgatcccctcaaagcatttccaggaaaggagattggctttgagacgaccagaaatattggttcagcccctgaaagtttccaacaggaaatcatctggttttagaagaagttttcgtcttagtagaaaagataagaaaacaaataaatccatgtatgaatgcaagaagagtgatcagtacgacacagctgacgtacccacatacgaagaagtgacaccgtatcggcgacaaactaatgaaaaatacagactcgttgtcttggttggtcccgtgggagtagggctgaatgaactgaaacgaaagctgctgatcagtgacacccagcactatggcgtgacagtgccccataccaccagagcaagaagaagccaggagagtgatggtgttgaatacattttcatttccaagcatttgtttgagacagatgtacaaaataacaagtttattgaatatggagaatataaaaacaactactacggcacaagtatagactcagttcggtctgtccttgctaaaaacaaagtttgtttgttggatgttcagcctcatacagtgaagcatttaaggacactagaatttaagccctatgtgatatttataaagcctccatcaatagagcgtttgagagaaacaagaaaaaatgcaaagattatttcaagcagagatgaccaaggtgctgcaaaacccttcacagaagaagattttcaagaaatgattaaatctgcacagataatggaaagtcaatatggtcatctttttgacaaaattataataaatgatgacctcactgtggcattcaatgagctcaaaacaacttttgacaaattagagacagagacccattgggtgccagtgagctggttacattcataa

SEQ ID NO: 71 - protein, 352 aa, Homo Sapiens
MKLFFQMFIKALFDYNPNEDKAIPCKEAGLSFKKGDILQIMSQDDATWWQAKHEADANPRAGLIPSKHFQERRLALRRPEILVQPLKVSNRKSSGFRRSFRLSRKDKKTNKSMYECKKSDQYDTADVPTYEEVTPYRRQTNEKYRLVVLVGPVGVGLNELKRKLLISDTQHYGVTVPHTTRARRSQESDGVEYIFISKHLFETDVQNNKFIEYGEYKNNYYGTSIDSVRSVLAKNKVCLLDVQPHTVKHLRTLEFKPYVIFIKPPSIERLRETRKNAKIISSRDDQGAAKPFTEEDFQEMIKSAQIMESQYGHLFDKIIINDDLTVAFNELKTTFDKLETETHWVPVSWLHS

SEQ ID NO: 72 - DNA, 1906 bp, Homo Sapiens
tgcccgcggaccgcggcagcccagagcagaaacggcttacaaaatatacagatcttggtagacaacgtggctgcaggctgttgaattggaattccctgtggctgtccgaaggcagggtgtccggagagcggtgggctgacctgttcctacaccttgcatcatgccagctttgtcaacgggatctgggagtgacactggtctgtatgagctgttggctgctctgccagcccagctgcagccacatgtggatagccaggaagacctgaccttcctctgggatatgtttggtgaaaaaagcctgcattcattggtaaagattcatgaaaaactacactactatgagaagcagagtccggtgcccattctccatggtgcggcggccttggccgatgatctggccgaagagcttcagaacaagccattaaacagtgagatcagagagctgttgaaactactgtcaaaacccaatgtgaaggctttgctctctgtacatgatactgtggctcagaagaattacgacccagtgttgcctcctatgcctgaagatattgacgatgaggaagactcagtaaaaataatccgtctggtcaaaaatagagaaccactgggagctaccattaagaaggatgaacagaccggggcgatcattgtggccagaatcatgagaggaggagctgcagatagaagtggtcttattcatgttggtgatgaacttagggaagtcaacgggataccagtggaggataaaaggcctgaggaaataatacagattttggctcagtctcagggagcaattacatttaagattatacccggcagcaaagaggagacaccatcaaaagaaggcaagatgtttatcaaagccctctttgactataatcctaatgaggataaggcaattccatgtaaggaagctgggctttctttcaaaaagggagatattcttcagattatgagccaagatgatgcaacttggtggcaagcgaaacacgaagctgatgccaaccccagggcaggcttgatcccctcaaagcatttccaggaaaggagattggctttgagacgaccagaaatattggttcagcccctgaaagtttccaacaggaaatcatctggttttagaagaagttttcgtcttagtagaaaagataagaaaacaaataaatccatgtatgaatgcaagaagagtgatcagtacgacacagctgacgtacccacatacgaagaagtgacaccgtatcggcgacaaactaatgaaaaatacagactcgttgtcttggttggtcccgtgggagtagggctgaatgaactgaaacgaaagctgctgatcagtgacacccagcactatggcgtgacagtgccccataccaccagagcaagaagaagccaggagagtgatggtgttgaatacattttcatttccaagcatttgtttgagacagatgtacaaaataacaagtttattgaatatggagaatataaaaacaactactacggcacaagtatagactcagttcggtctgtccttgctaaaaacaaagtttgtttgttggatgttcagcctcatacagtgaagcatttaaggacactagaatttaagccctatgtgatatttataaagcctccatcaatagagcgtttgagagaaacaagaaaaaatgcaaagattatttcaagcagagatgaccaaggtgctgcaaaacccttcacagaagaagattttcaagaaatgattaaatctgcacagataatggaaagtcaatatggtcatctttttgacaaaattataataaatgatgacctcactgtggcattcaatgagctcaaaacaacttttgacaaattagagacagagacccattgggtgccagtgagctggttacattcataacttaaaaaaaaaaaa

SEQ ID NO: 73 - DNA, 5426 bp, Homo Sapiens
cattcgctccagggttttgggaccctaggttgcggagtccttaccctaccctggcctctcgagcagttgtccccataactcggaatctagagccgctgttgcgaggcaggagcacgtggcagtcaagtagcttcccagtcccgaacgccgcccgtccccaccccgccgtggccactagcaacgacctctgtgaagttggagaggcggtaacggaggcactccccctgctgcaccccgccgtttctacggggctcagaaaccagtttgtttgtttcgtcggggtagtgtcgacctgtcttacgggcgtcgcccgagacaggacggagtcaaacccgtggtatcaactgaagacgagtgtcaggatgtcattttcaaaatgcgggatggtacctctgctttattaagccccgtaggaagactgccacacctagactgatgcttattagtcatcaccgttattcctactaacgtcctgtgtcactgagttttttaaatgtctagcatatctgtaaagatgccttagaaaaagaatcatggagaagtatgttagactacagaagattggagaaggttcatttggaaaagccattcttgttaaatctacagaagatggcagacagtatgttatcaaggaaattaacatctcaagaatgtccagtaaagaaagagaagaatcaaggagagaagttgcagtattggcaaacatgaagcatccaaatattgtccagtatagagaatcatttgaagaaaatggctctctctacatagtaatggattactgtgagggaggggatctgtttaagcgaataaatgctcagaaaggcgttttgtttcaagaggatcagattttggactggtttgtacagatatgtttggccctgaaacatgtacatgatagaaaaattcttcatcgagacattaaatctcagaacatatttttaactaaagatggaacagtacaacttggagattttggaattgctagagttcttaatagtactgtagagctggctcgaacttgcatagggaccccatactacttgtcacctgaaatctgtgaaaacaaaccttacaataataaaagtgacatttgggctctggggtgtgtcctttatgagctgtgtacacttaaacatgcttttgaagctggcagtatgaaaaacctggtactgaagataatatctggatcttttccacctgtgtctttgcattattcctatgatctccgcagtttggtgtctcagttatttaaaagaaatcctagggatagaccatcagtcaactccatattggagaaaggttttatagccaaacgcattgaaaagtttctctctcctcagcttattgcagaagaattttgtctaaaaacattttcgaagtttggatcacagcctataccagctaaaagaccagcttcaggacaaaactcgatttctgttatgcctgctcagaaaattacaaagcctgccgctaaatatggaatacctttagcatataagaaatatggagataaaaaattacacgaaaagaaaccactgcaaaaacataaacaggcccatcaaactccagagaagagagtgaatactggagaagaaaggaggaaaatatctgaggaagcagcaagaaagagaaggctggaatttattgaaaaagaaaagaaacaaaaggatcagattattagtttaatgaaggctgaacaaatgaaaaggcaagaaaaggaaaggttggaaagaataaatagggccagggaacaaggatggagaaatgtgctaagtgctggtggaagtggtgaagtaaaggctccttttctgggcagtggagggactatagctccatcatctttttcttctcgaggacagtatgaacattaccatgccatttttgaccaaatgcagcaacaaagagcagaagataatgaagctaaatggaaaagagaaatatatggtcgaggtcttccagaaaggcaaaaagggcagctagctgtagaaagagctaaacaagtagaagagttcctgcagcgaaaacgggaagctatgcagaataaagctcgagccgaaggacatatggtttatctggcaagactgaggcaaataagactacagaatttcaatgagcgccaacagattaaagccaaacttcgtggtgaaaagaaagaagctaatcattctgaaggacaagaaggaagtgaagaggctgacatgaggcgcaaaaaaatcgaatcactgaaggcccatgcaaatgcacgtgctgctgtactaaaagaacaactagaacgaaagagaaaggaggcttatgagagagaaaaaaaagtgtgggaagagcatttggtggctaaaggagttaagagttctgatgtttctccacctttgggacagcatgaaacaggtggctctccatcaaagcaacagatgagatctgttatttctgtaacttcagctttgaaagaagttggcgtggacagtagtttaactgatacccgggaaacttcagaagagatgcaaaagaccaacaatgctatttcaagtaagcgagaaatacttcgcagattaaatgaaaatcttaaagctcaagaagatgaaaaaggaatgcagaatctctctgatacttttgagataaatgttcatgaagatgccaaagagcatgaaaaagaaaaatcagtttcatctgatcgcaagaagtgggaggcaggaggtcaacttgtgattcctctggatgagttaacactagatacatccttctctacaactgaaagacatacagtgggagaagttattaaattaggtcctaatggatctccaagaagagcctgggggaaaagtccgacagattctgttctaaagatacttggagaagctgaactacaacttcagacagaactattagaaaatacaactattagaagtgagatttctcccgaaggggaaaagtacaaacccttaattactggagaaaaaaaagtacaatgtatttcacatgaaataaacccatcagctattgttgattctcctgttgagacaaaaagtcccgagttcagtgaggcatctccacagatgtcattgaaactggaaggaaatttagaagaacctgatgatttggaaacagaaattctacaagagccaagtggaacaaacaaagatgagagcttgccatgcactattactgatgtgtggattagtgaggaaaaagaaacaaaggaaactcagtcggcagataggatcaccattcaggaaaatgaagtttctgaagatggagtctcgagtactgtggaccaacttagtgacattcatatagagcctggaaccaatgattctcagcactctaaatgtgatgtagataagtctgtgcaaccggaaccatttttccataaggtggttcattctgaacacttgaacttagtccctcaagttcaatcagttcagtgttcaccagaagaatcctttgcatttcgatctcactcgcatttaccaccaaaaaataaaaacaagaattccttgctgattggactttcaactggtctgtttgatgcaaacaacccaaagatgttaaggacatgttcacttccagatctctcaaagctgttcagaacccttatggatgttcccaccgtaggagatgttcgtcaagacaatcttgaaatagatgaaattaaagatgaaaacattaaagaaggaccttctgattctgaagacattgtgtttgaagaaactgacacagatttacaagagctgcaggcctcgatggaacagttacttagggaacaacctggtgaagaatacagtgaagaagaagagtcagtcttgaagaacagtgatgtggagccaactgcaaatgggacagatgtggcagatgaagatgacaatcccagtagtgaaagtgccctgaacgaagaatggcactcagataacagtgatggtgaaattgctagtgaatgtgaatgcgatagtgtctttaaccatttagaggaactgagacttcatctggagcaggaaatgggctttgaaaaattctttgaggtttatgagaaaataaaggctattcatgaagatgaagatgaaaatattgaaatttgttcaaaaatagttcaaaatattttgggaaatgaacatcagcatctttatgccaagattcttcatttagtcatggcagatggagcctaccaagaagataatgatgaataatcctcaaaatgttttttaatcctcaactatatgaaagcatttgaatttggcttatcagaataacaagcttcagtgggaaatacagcaattatttatttaaaaaatcagatttaagatggactttcttattgcatgaaaaagatggagaaacatgccatttttcaatgaagattctaatattttatctattttgttcattgaattccatggttaaatctcataaaatatatactttattaaatcatccaaccaaagcataggaaacattgacccagaacctgacttaatggttttgaagatttactatgcaatagggtaactttgagtttcagcaaatgtctttaggttgaaggaattacctatgtcatgaaggacctgtctgtggtttttcaatggagtctttaagcatgatcttttttctgtctagtacttgttttcattctggccagcagttctacattaaatcaccttgtcaagggctctgtttacatctacacattttgaagatgaaatttttagccttaaagtttatattctcaagtccttttacaatcagtgtgtctcctgaactagcacacaggctgtagaaacagtcttagaaatcattgaaagatttgattatgaaagaatagcaaaattatatttcttgacatataaaaagttggtttaatgcctttatttctctttaaggaccagaaccaggaatactgtatcgaaaaattagtctgtggatttaacactgacttagcatatagcttaaagttgctcttttggtttttaacttcctccatacataagcttcaaggacaataagatgttaaagaggaggaaataattatttttattttgacactgtgacagttttggtaactaggatcctagggagggaaatgtttgcctgttgaacttctttctgttatgagaggatttagttaggtcattaagatgttgatcacacagcttcaatcacaatatgccaagtataacctggtttcgttagaggtgtctacagtccagatgttcttcgtaataaaagcaaagtttttgaacctctgagtccaaagcaggctggttggcataatatgtaatttgaaaaataaaatcttatcttgcagcactatcagtatgttgaatttattatgtatattatttctaatatccgaaactaaatacttgattttttaatatgtgtgtttattttatgatattgctattaaatttttattatccaaaaaaaaaaaaaaaaaa

SEQ ID NO: 74 - DNA, 1662 bp, Homo Sapiens
  CDS (1)...(1662)
atggtggacatgggggccctggayaacctgatcgccaacaccgcctacctgcaggcccggaagccctcggactgcgacagcaaagagctgcagcggcggcggcgtagcctggccctgcccgggctgcagggctgcgcggagctccgccagaagctgtccctgaacttccacagcctgtgtgagcagcagcccatcggtcgccgcctcttccgtgacttcctagccacagtgcccacgttccgcaaggcggcaaccttcctagaggacgtgcagaactgggagctggccgaggagggacccaccaaagacagcgcgctgcaggggctggtggccacttgtgcgagtgcccctgccccggggaacccgcaacccttcctcagccaggccgtggccaccaagtgccaagcagccaccactgaggaagagcgagtggctgcagtgacgctggccaaggctgaggccatggctttcttgcaagagcagccctttaaggatttcgtgaccagcgccttctacgacaagtttctgcagtggaaactcttcgagatgcaaccagtgtcagacaagtacttcactgagttcagagtgctggggaaaggtggttttggggaggtatgtgccgtccaggtgaaaaacactgggaagatgtatgcctgtaagaaactggacaagaagcggctgaagaagaaaggtggcgagaagatggctctcttggaaaaggaaatcttggagaaggtcagcagccctttcattgtctctctggcctatgcctttgagagcaagacccatctctgccttgtcatgagcctgatgaatgggggagacctcaagttccacatctacaacgtgggcacgcgtggcctggacatgagccgggtgatcttttactcggcccagatagcctgtgggatgctgcacctccatgaactcggcatcgtctatcgggacatgaagcctgagaatgtgcttctggatgacctcggcaactgcaggttatctgacctggggctggccgtggagatgaagggtggcaagcccatcacccagagggctggaaccaatggttacatggctcctgagatcctaatggaaaaggtaagttattcctatcctgtggactggtttgccatgggatgcagcatttatgaaatggttgctggacgaacaccattcaaagattacaaggaaaaggtcagtaaagaggatctgaagcaaagaactctgcaagacgaggtcaaattccagcatgataacttcacagaggaagcaaaagatatttgcaggctcttcttggctaagaaaccagagcaacgcttaggaagcagagaaaagtctgatgatcccaggaaacatcatttctttaaaacgatcaactttcctcgcctggaagctggcctaattgaacccccatttgtgccagacccttcagtggtttatgccaaagacatcgctgaaattgatgatttctctgaggttcggggggtggaatttgatgacaaagataagcagttcttcaaaaactttgcgacaggtgctgttcctatagcatggcaggaagaaattatagaaacgggactgtttgaggaactgaatgaccccaacagacctacgggttgtgaggagggtaattcatccaagtctggcgtgtgtttgttattgtaa

SEQ ID NO: 75 - protein, 553 aa, Homo Sapiens
MVDMGALDNLIANTAYLQARKPSDCDSKELQRRRRSLALPGLQGCAELRQKLSLNFHSLCEQQPIGRRLFRDFLATVPTFRKAATFLEDVQNWELAEEGPTKDSALQGLVATCASAPAPGNPQPFLSQAVATKCQAATTEEERVAAVTLAKAEAMAFLQEQPFKDFVTSAFYDKFLQWKLFEMQPVSDKYFTEFRVLGKGGFGEVCAVQVKNTGKMYACKKLDKKRLKKKGGEKMALLEKEILEKVSSPFIVSLAYAFESKTHLCLVMSLMNGGDLKFHIYNVGTRGLDMSRVIFYSAQIACGMLHLHELGIVYRDMKPENVLLDDLGNCRLSDLGLAVEMKGGKPITQRAGTNGYMAPEILMEKVSYSYPVDWFAMGCSIYEMVAGRTPFKDYKEKVSKEDLKQRTLQDEVKFQHDNFTEEAKDICRLFLAKKPEQRLGSREKSDDPRKHHFFKTINFPRLEAGLIEPPFVPDPSVVYAKDIAEIDDFSEVRGVEFDDKDKQFFKNFATGAVPIAWQEEIIETGLFEELNDPNRPTGCEEGNSSKSGVCLLL

SEQ ID NO: 76 - DNA, 1062 bp, Homo Sapiens
  CDS (1)...(1062)
atggtggacatgggggccctggacaacctgatcgccaacaccgcctacctgcaggcccggaagccctcggactgcgacagcaaagagctgcagcggcggcggcgtagcctggccctgcccgggctgcagggctgcgcggagctccgccagaagctgtccctgaacttccacagcctgtgtgagcagcagcccatcggtcgccgcctcttccgtgacttcctagccacagtgcccacgttccgcaaggcggcaaccttcctagaggacgtgcagaactgggagctggccgaggagggacccaccaaagacagcgcgctgcaggggctggtggccacttgtgcgagtgcccctgccccggggaacccgcaacccttcctcagccaggccgtggccaccaagtgccaagcagccaccactgaggaagagcgagtggctgcagtgacgctggccaaggctgaggccatggctttcttgcaagagcagccctttaaggatttcgtgaccagcgccttctacgacaagtttctgcagtggaaactcttcgagatgcaaccagtgtcagacaagtacttcactgagttcagagtgctggggaaaggtggttttggggaggtatgtgccgtccaggtgaaaaacactgggaagatgtatgcctgtaagaaactggacaagaagcggctgaagaagaaaggtggcgagaagatggctctcttggaaaaggaaatcttggagaaggtcagcagccctttcattgtctctctggcctatgcctttgagagcaagacccatctctgccttgtcatgagcctgatgaatgggggagacctcaagttccacatctacaacgtgggcacgcgtggcctggacatgagccgggtgatcttttactcggcccagatagcctgtgggatgctgcacctccatgaactcggcatcgtctatcgggacatgaagcctgagaatgtgcttctggatgacctcggcaactgcaggttatctgacctggggctggccgtggagatgaagggtggcaagcccatcacccagaggagaaaagtctga

SEQ ID NO: 77 - protein, 353 aa, Homo Sapiens
MVDMGALDNLIANTAYLQARKPSDCDSKELQRRRRSLALPGLQGCAELRQKLSLNFHSLCEQQPIGRRLFRDFLATVPTFRKAATFLEDVQNWELAEEGPTKDSALQGLVATCASAPAPGNPQPFLSQAVATKCQAATTEEERVAAVTLAKAEAMAFLQEQPFKDFVTSAFYDKFLQWKLFEMQPVSDKYFTEFRVLGKGGFGEVCAVQVKNTGKMYACKKLDKKRLKKKGGEKMALLEKEILEKVSSPFIVSLAYAFESKTHLCLVMSLMNGGDLKFHIYNVGTRGLDMSRVIFYSAQIACGMLHLHELGIVYRDMKPENVLLDDLGNCRLSDLGLAVEMKGGKPITQRRKV

SEQ ID NO: 78 - DNA, 2249 bp, Homo Sapiens
aaaactgctctgaggccatcatgctttgaggaagcccaggaggaaacactgcagagaggctcaaccaccccagctctcccagctgagctcagccacccaccgatcccccagctgaatgcaaccataagagtgagtccaggttctaccctgctaggctgccaccacattcctaagaaccacgggaaaaggcatttgctcctccgaagaaattctcagactgatttttcactgtattgtcaggccacaggactcactgtaaatcccttggacgttgtctcacccgggaagggaaagcagccagcagccctccagccctcttgtgctttccctgggagtgcgccccgtgctcagccatggtggacatgggggccctggacaacctgatcgccaacaccgcctacctgcaggcccggaagccctcggactgcgacagcaaagagctgcagcggcggcggcgtagcctggccctgcccgggctgcagggctgcgcggagctccgccagaagctgtccctgaacttccacagcctgtgtgagcagcagcccatcggtcgccgcctcttccgtgacttcctagccacagtgcccacgttccgcaaggcggcaaccttcctagaggacgtgcagaactgggagctggccgaggagggacccaccaaagacagcgcgctgcaggggctggtggccacttgtgcgagtgcccctgccccggggaacccgcaacccttcctcagccaggccgtggccaccaagtgccaagcagccaccactgaggaagagcgagtggctgcagtgacgctggccaaggctgaggccatggctttcttgcaagagcagccctttaaggatttcgtgaccagcgccttctacgacaagtttctgcagtggaaactcttcgagatgcaaccagtgtcagacaagtacttcactgagttcagagtgctggggaaaggtggttttggggaggtatgtgccgtccaggtgaaaaacactgggaagatgtatgcctgtaagaaactggacaagaagcggctgaagaagaaaggtggcgagaagatggctctcttggaaaaggaaatcttggagaaggtcagcagccctttcattgtctctctggcctatgcctttgagagcaagacccatctctgccttgtcatgagcctgatgaatgggggagacctcaagttccacatctacaacgtgggcacgcgtggcctggacatgagccgggtgatcttttactcggcccagatagcctgtgggatgctgcacctccatgaactcggcatcgtctatcgggacatgaagcctgagaatgtgcttctggatgacctcggcaactgcaggttatctgacctggggctggccgtggagatgaagggtggcaagcccatcacccagagggctggaaccaatggttacatggctcctgagatcctaatggaaaaggtaagttattcctatcctgtggactggtttgccatgggatgcagcatttatgaaatggttgctggacgaacaccattcaaagattacaaggaaaaggtcagtaaagaggatctgaagcaaagaactctgcaagacgaggtcaaattccagcatgataacttcacagaggaagcaaaagatatttgcaggctcttcttggctaagaaaccagagcaacgcttaggaagcagagaaaagtctgatgatcccaggaaacatcatttctttaaaacgatcaactttcctcgcctggaagctggcctaattgaacccccatttgtgccagacccttcagtggtttatgccaaagacatcgctgaaattgatgatttctctgaggttcggggggtggaatttgatgacaaagataagcagttcttcaaaaactttgcgacaggtgctgttcctatagcatggcaggaagaaattatagaaacgggactgtttgaggaactgaatgaccccaacagacctacgggttgtgaggagggtaattcatccaagtctggcgtgtgtttgttattgtaaattgctctctttaccagacaggcagcaggagtctcggctgacataatcctcgaatgttccacacgtggaaatctgtggaatgagggctaatcagttaggagggacatcacaaccacaaaacaattcaaaagacaggcaagctcactactagaacacattttattttctttttctttcttcataaagatgagtaaagtctcagttttcactgagggcagggaaaaggaacactca

SEQ ID NO: 79 - DNA, 1545 bp, Homo Sapiens
  CDS (1)...(1545)
atggctgatagtggcttagataaaaaatccacaaaatgccccgactgttcatctgcttctcagaaagatgtactttgtgtatgttccagcaaaacaagggttcctccagttttggtggtggaaatgtcacagacatcaagcattggtagtgcagaatctttaatttcactggagagaaaaaaagaaaaaaatatcaacagagatataacctccaggaaagatttgccctcaagaacctcaaatgtagagagaaaagcatctcagcaacaatggggtcggggcaactttacagaaggaaaagttcctcacataaggattgagaatggagctgctattgaggaaatctatacctttggaagaatattgggaaaagggagctttggaatagtcattgaagcgacagacaaggaaacagaaacgaagtgggcaattaaaaaagtgaacaaagaaaaggctggaagctctgctgtgaagttacttgaacgagaggtgaacattctgaaaagtgtaaaacatgaacacatcatacatctggaacaagtatttgaaacgccaaagaaaatgtaccttgtgatggagctttgtgaggatggagaactcaaagaaattctggataggaaagggcatttctcagagaatgagacaaggtggatcattcaaagtctcgcatcagctatagcatatcttcacaataatgatattgtacatagagatctgaaactggaaaatataatggttaaaagcagtcttattgatgataacaatgaaataaacttaaacataaaggtgactgattttggcttagcggtgaagaagcaaagtaggagtgaagccatgctgcaggccacatgtgggactcctatctatatggcccctgaagttatcagtgcccacgactatagccagcagtgtgacatttggagcataggcgtcgtaatgtacatgttattacgtggagaaccaccctttttggcaagctcagaagagaagctttttgagttaataagaaaaggagaactacattttgaaaatgcagtctggaattccataagtgactgtgctaaaagtgttttgaaacaacttatgaaagtagatcctgctcacagaatcacagctaaggaactactagataaccagtggttaacaggcaataaactttcttcggtgagaccaaccaatgtattagagatgatgaaggaatggaaaaataacccagaaagtgttgaggaaaacacaacagaagagaagaataagccgtccactgaagaaaagttgaaaagttaccaaccctggggaaatgtccctgatgccaattacacttcagatgaagaggaggaaaaacagtctactgcttatgaaaagcaatttcctgcaaccagtaaggacaactttgatatgtgcagttcaagtttcacatctagcaaactccttccagctgaaatcaagggagaaatggagaaaacccctgtgactccaagccaaggaacagcaaccaagtaccctgctaaatccggcgccctgtccagaaccaaaaagaaactctaa

SEQ ID NO: 80 - protein, 514 aa, Homo Sapiens
MADSGLDKKSTKCPDCSSASQKDVLCVCSSKTRVPPVLVVEMSQTSSIGSAESLISLERKKEKNINRDITSRKDLPSRTSNVERKASQQQWGRGNFTEGKVPHIRIENGAAIEEIYTFGRILGKGSFGIVIEATDKETETKWAIKKVNKEKAGSSAVKLLEREVNILKSVKHEHIIHLEQVFETPKKMYLVMELCEDGELKEILDRKGHFSENETRWIIQSLASAIAYLHNNDIVHRDLKLENIMVKSSLIDDNNEINLNIKVTDFGLAVKKQSRSEAMLQATCGTPIYMAPEVISAHDYSQQCDIWSIGVVMYMLLRGEPPFLASSEEKLFELIRKGELHFENAVWNSISDCAKSVLKQLMKVDPAHRITAKELLDNQWLTGNKLSSVRPTNVLEMMKEWKNNPESVEENTTEEKNKPSTEEKLKSYQPWGNVPDANYTSDEEEEKQSTAYEKQFPATSKDNFDMCSSSFTSSKLLPAEIKGEMEKTPVTPSQGTATKYPAKSGALSRTKKKL

SEQ ID NO: 81 - DNA, 2001 bp, Homo Sapiens
gataaacgttacataactagaaagtggcagagctgtcacgtgtgaatatgtgtctagtgcatccttaacctgaggacttcaccagttcgaaattacagttttcaccatcaactaccttatcctttttggtctggttttcttcctcaaacagtggaaacatttttaaagttgcttttgttgcagagttaaacaaatggctgatagtggcttagataaaaaatccacaaaatgccccgactgttcatctgcttctcagaaagatgtactttgtgtatgttccagcaaaacaagggttcctccagttttggtggtggaaatgtcacagacatcaagcattggtagtgcagaatctttaatttcactggagagaaaaaaagaaaaaaatatcaacagagatataacctccaggaaagatttgccctcaagaacctcaaatgtagagagaaaagcatctcagcaacaatggggtcggggcaactttacagaaggaaaagttcctcacataaggattgagaatggagctgctattgaggaaatctatacctttggaagaatattgggaaaagggagctttggaatagtcattgaagcgacagacaaggaaacagaaacgaagtgggcaattaaaaaagtgaacaaagaaaaggctggaagctctgctgtgaagttacttgaacgagaggtgaacattctgaaaagtgtaaaacatgaacacatcatacatctggaacaagtatttgaaacgccaaagaaaatgtaccttgtgatggagctttgtgaggatggagaactcaaagaaattctggataggaaagggcatttctcagagaatgagacaaggtggatcattcaaagtctcgcatcagctatagcatatcttcacaataatgatattgtacatagagatctgaaactggaaaatataatggttaaaagcagtcttattgatgataacaatgaaataaacttaaacataaaggtgactgattttggcttagcggtgaagaagcaaagtaggagtgaagccatgctgcaggccacatgtgggactcctatctatatggcccctgaagttatcagtgcccacgactatagccagcagtgtgacatttggagcataggcgtcgtaatgtacatgttattacgtggagaaccaccctttttggcaagctcagaagagaagctttttgagttaataagaaaaggagaactacattttgaaaatgcagtctggaattccataagtgactgtgctaaaagtgttttgaaacaacttatgaaagtagatcctgctcacagaatcacagctaaggaactactagataaccagtggttaacaggcaataaactttcttcggtgagaccaaccaatgtattagagatgatgaaggaatggaaaaataacccagaaagtgttgaggaaaacacaacagaagagaagaataagccgtccactgaagaaaagttgaaaagttaccaaccctggggaaatgtccctgatgccaattacacttcagatgaagaggaggaaaaacagtctactgcttatgaaaagcaatttcctgcaaccagtaaggacaactttgatatgtgcagttcaagtttcacatctagcaaactccttccagctgaaatcaagggagaaatggagaaaacccctgtgactccaagccaaggaacagcaaccaagtaccctgctaaatccggcgccctgtccagaaccaaaaagaaactctaaggttccctccagtgttggacagtacaaaaacaaagctgctcttgttagcactttgatgagggggtaggaggggaagaagacagccctatgctgagcttgtagccttttagctccacagagccccgccatgtgtttgcaccagcttaaaattgaagctgcttatctccaaagcagcataagctgcacatggcattaaaggacagccaccagtaggcttggcagtgggctgcagtggaaatcaactcaagatgtacacgaaggtt

SEQ ID NO: 82 - DNA, 678 bp, Homo Sapiens
  CDS (1)...(678)
atgggagccaacacttcaagaaaaccaccagtgtttgatgaaaatgaagatgtcaactttgaccactttgaaattttgcgagccattgggaaaggcagttttgggaaggtctgcattgtacagaagaatgataccaagaagatgtacgcaatgaagtacatgaataaacaaaagtgcgtggagcgcaatgaagtgagaaatgtcttcaaggaactccagatcatgcagggtctggagcaccctttcctggttaatttgtggtattccttccaagatgaggaagacatgttcatggtggtggacctcctgctgggtggagacctgcgttatcacctgcaacagaacgtccacttcaaggaagaaacagtgaagctcttcatctgtgagctggtcatggccctggactacctgcagaaccagcgcatcattcacagggatatgaagcctgacaatattttacttgacgaacatgggcacgtgcacatcacagatttcaacattgctgcgatgctgcccagggagacacagattaccaccatggctggcaccaagccttacatggcacctgagatgttcagctccagaaaaggagcaggctattcctttgctgttgactggtggtccctgggagtgacggcatatgaactgctgagaggccgggtggcccagaaacagtag

SEQ ID NO: 83 - protein, 225 aa, Homo Sapiens
MGANTSRKPPVFDENEDVNFDHFEILRAIGKGSFGKVCIVQKNDTKKMYAMKYMNKQKCVERNEVRNVFKELQIMQGLEHPFLVNLWYSFQDEEDMFMVVDLLLGGDLRYHLQQNVHFKEETVKLFICELVMALDYLQNQRIIHRDMKPDNILLDEHGHVHITDFNIAAMLPRETQITTMAGTKPYMAPEMFSSRKGAGYSFAVDWWSLGVTAYELLRGRVAQKQ

SEQ ID NO: 84 - DNA, 711 bp, Homo Sapiens
  CDS (1)...(711)
atgggagccaacacttcaagaaaaccaccagtgtttgatgaaaatgaagatgtcaactttgaccactttgaaattttgcgagccattgggaaaggcagttttgggaaggtctgcattgtacagaagaatgataccaagaagatgtacgcaatgaagtacatgaataaacaaaagtgcgtggagcgcaatgaagtgagaaatgtcttcaaggaactccagatcatgcagggtctggagcaccctttcctggttaatttgtggtattccttccaagatgaggaagacatgttcatggtggtggacctcctgctgggtggagacctgcgttatcacctgcaacagaacgtccacttcaaggaagaaacagtgaagctcttcatctgtgagctggtcatggccctggactacctgcagaaccagcgcatcattcacagggatatgaagcctgacaatattttacttgacgaacatgggcacgtgcacatcacagatttcaacattgctgcgatgctgcccagggagacacagattaccaccatggctggcaccaagccttacatggcacctgagatgttcagctccagaaaaggagcaggctattcctttgctgttgactggtggtccctgggagtgacggcatatgaactgctgagaggccggactgtagtagcatttcctctttggttatttttccagcaagttctattttag

SEQ ID NO: 85 - protein, 236 aa, Homo Sapiens
MGANTSRKPPVFDENEDVNFDHFEILRAIGKGSFGKVCIVQKNDTKKMYAMKYMNKQKCVERNEVRNVFKELQIMQGLEHPFLVNLWYSFQDEEDMFMVVDLLLGGDLRYHLQQNVHFKEETVKLFICELVMALDYLQNQRIIHRDMKPDNILLDEHGHVHITDFNIAAMLPRETQITTMAGTKPYMAPEMFSSRKGAGYSFAVDWWSLGVTAYELLRGRTVVAFPLWLFFQQVLF

SEQ ID NO: 86 - DNA, 1224 bp, Homo Sapiens
  CDS (1)...(1224)
atgggagccaacacttcaagaaaaccaccagtgtttgatgaaaatgaagatgtcaactttgaccactttgaaattttgcgagccattgggaaaggcagttttgggaaggtctgcattgtacagaagaatgataccaagaagatgtacgcaatgaagtacatgaataaacaaaagtgcgtggagcgcaatgaagtgagaaatgtcttcaaggaactccagatcatgcagggtctggagcaccctttcctggttaatttgtggtattccttccaagatgaggaagacatgttcatggtggtggacctcctgctgggtggagacctgcgttatcacctgcaacagaacgtccacttcaaggaagaaacagtgaagctcttcatctgtgagctggtcatggccctggactacctgcagaaccagcgcatcattcacagggatatgaagcctgacaatattttacttgacgaacatgggcacgtgcacatcacagatttcaacattgctgcgatgctgcccagggagacacagattaccaccatggctggcaccaagccttacatggcacctgagatgttcagctccagaaaaggagcaggctattcctttgctgttgactggtggtccctgggagtgacggcatatgaactgctgagaggccggagaccgtatcatattcgctccagtacttccagcaaggaaattgtacacacgtttgagacgactgttgtaacttacccttctgcctggtcacaggaaatggtgtcacttcttaaaaagctactcgaacctaatccagaccaacgattttctcagttatctgatgtccagaacttcccgtatatgaatgatataaactgggatgcagtttttcagaagaggctcattccaggtttcattcctaataaaggcaggctgaattgtgatcctacctttgaacttgaggaaatgattttggagtccaaacctctacataagaaaaaaaagcgtctggcaaagaaggagaaggatatgaggaaatgcgattcttctcagacatgtcttcttcaagagcaccttgactctgtccagaaggagttcataattttcaacagagaaaaagtaaacagggactttaacaaaagacaaccaaatctagccttggaacaaaccaaagacccacaagtgacaaatggacaaatggacacaggactcagtgagacttttcagacctcgaaagtttcataa

SEQ ID NO: 87 - protein, 407 aa, Homo Sapiens
MGANTSRKPPVFDENEDVNFDHFEILRAIGKGSFGKVCIVQKNDTKKMYAMKYMNKQKCVERNEVRNVFKELQIMQGLEHPFLVNLWYSFQDEEDMFMVVDLLLGGDLRYHLQQNVHFKEETVKLFICELVMALDYLQNQRIIHRDMKPDNILLDEHGHVHITDFNIAAMLPRETQITTMAGTKPYMAPEMFSSRKGAGYSFAVDWWSLGVTAYELLRGRRPYHIRSSTSSKEIVHTFETTVVTYPSAWSQEMVSLLKKLLEPNPDQRFSQLSDVQNFPYMNDINWDAVFQKRLIPGFIPNKGRLNCDPTFELEEMILESKPLHKKKKRLAKKEKDMRKCDSSQTCLLQEHLDSVQKEFIIFNREKVNRDFNKRQPNLALEQTKDPQVTNGQMDTGLSETFQTSKVS

SEQ ID NO: 88 - DNA, 1191 bp, Homo Sapiens
  CDS (1)...(1191)
atgggagccaacacttcaagaaaaccaccagtgtttgatgaaaatgaagatgtcaactttgaccactttgaaattttgcgagccattgggaaaggcagttttgggaaggtctgcattgtacagaagaatgataccaagaagatgtacgcaatgaagtacatgaataaacaaaagtgcgtggagcgcaatgaagtgagaaatgtcttcaaggaactccagatcatgcagggtctggagcaccctttcctggttaatttgtggtattccttccaagatgaggaagacatgttcatggtggtggacctcctgctgggtggagacctgcgttatcacctgcaacagaacgtccacttcaaggaagaaacagtgaagctcttcatctgtgagctggtcatggccctggactacctgcagaaccagcgcatcattcacagggatatgaagcctgacaatattttacttgacgaacatgggcacgtgcacatcacagatttcaacattgctgcgatgctgcccagggagacacagattaccaccatggctggcaccaagccttacatggcacctgagatgttcagctccagaaaaggagcaggctattcctttgctgttgactggtggtccctgggagtgacggcatatgaactgctgagaggccggagaccgtatcatattcgctccagtacttccagcaaggaaattgtacacacgtttgagacgactgttgtaacttacccttctgcctggtcacaggaaatggtgtcacttcttaaaaagctactcgaacctaatccagaccaacgattttctcagttatctgatgtccagaacttcccgtatatgaatgatataaactgggatgcagtttttcagaagaggctcattccaggtttcattcctaataaaggcaggctgaattgtgatcctacctttgaacttgaggaaatgattttggagtccaaacctctacataagaaaaaaaagcgtctggcaaagaaggagaaggatatgaggaaatgcgattcttctcagacatgtcttcttcaagagcaccttgactctgtccagaaggagttcataattttcaacagagaaaaagtaaacagggactttaacaaaagacaaccaaatctagccttggaacaaaccaaagacccacaaggtgaggatggtcagaataacaacttgtaa

SEQ ID NO: 89 - protein, 396 aa, Homo Sapiens
MGANTSRKPPVFDENEDVNFDHFEILRAIGKGSFGKVCIVQKNDTKKMYAMKYMNKQKCVERNEVRNVFKELQIMQGLEHPFLVNLWYSFQDEEDMFMVVDLLLGGDLRYHLQQNVHFKEETVKLFICELVMALDYLQNQRIIHRDMKPDNILLDEHGHVHITDFNIAAMLPRETQITTMAGTKPYMAPEMFSSRKGAGYSFAVDWWSLGVTAYELLRGRRPYHIRSSTSSKEIVHTFETTVVTYPSAWSQEMVSLLKKLLEPNPDQRFSQLSDVQNFPYMNDINWDAVFQKRLIPGFIPNKGRLNCDPTFELEEMILESKPLHKKKKRLAKKEKDMRKCDSSQTCLLQEHLDSVQKEFIIFNREKVNRDFNKRQPNLALEQTKDPQGEDGQNNNL

SEQ ID NO: 90 - DNA, 1675 bp, Homo Sapiens
gagcgctaagcggagacgcccgctggcaagcagatcctgcctccttccctggccaaggagccgcccctccggggtagctgtgcgctgggcggcgctcggaccccttggcagccgcaggtgcctccccagcccagcccagctcagtccagcgcagcccagcccagcccagcccggcgctcgcagcctccgccgcttccgggcagataggtgccttttcttgctccttgctcttggagttcttctcttagtccctgttccctggatgaaagcatcgctccgagcctcatgggaggaatgaaggaagaatcgagactagatatccaactaaggcttcgggacatgttttgagcgaagatgggtgtttctgcccggatagtataaatcgaggatccaggtctgggcagattcaaccatgggagccaacacttcaagaaaaccaccagtgtttgatgaaaatgaagatgtcaactttgaccactttgaaattttgcgagccattgggaaaggcagttttgggaaggtctgcattgtacagaagaatgataccaagaagatgtacgcaatgaagtacatgaataaacaaaagtgcgtggagcgcaatgaagtgagaaatgtcttcaaggaactccagatcatgcagggtctggagcaccctttcctggttaatttgtggtattccttccaagatgaggaagacatgttcatggtggtggacctcctgctgggtggagacctgcgttatcacctgcaacagaacgtccacttcaaggaagaaacagtgaagctcttcatctgtgagctggtcatggccctggactacctgcagaaccagcgcatcattcacagggatatgaagcctgacaatattttacttgacgaacatgggcacgtgcacatcacagatttcaacattgctgcgatgctgcccagggagacacagattaccaccatggctggcaccaagccttacatggcacctgagatgttcagctccagaaaaggagcaggctattcctttgctgttgactggtggtccctgggagtgacggcatatgaactgctgagaggccggagaccgtatcatattcgctccagtacttccagcaaggaaattgtacacacgtttgagacgactgttgtaacttacccttctgcctggtcacaggaaatggtgtcacttcttaaaaagctactcgaacctaatccagaccaacgattttctcagttatctgatgtccagaacttcccgtatatgaatgatataaactgggatgcagtttttcagaagaggctcattccaggtttcattcctaataaaggcaggctgaattgtgatcctacctttgaacttgaggaaatgattttggagtccaaacctctacataagaaaaaaaagcgtctggcaaagaaggagaaggatatgaggaaatgcgattcttctcagacatgtcttcttcaagagcaccttgactctgtccagaaggagttcataattttcaacagagaaaaagtaaacagggactttaacaaaagacaaccaaatctagccttggaacaaaccaaagacccacaagtgacaaatggacaaatggacacaggactcagtgagacttttcagacctcgaaagtttcataaagtggtcagaatgccccaggctacttggataaagataag

SEQ ID NO: 91 - DNA, 7149 bp, Homo Sapiens
  CDS (1)...(7149)
atgtctggcggcgccgcagagaagcagagcagcactcccggttccctgttcctctcgccgccggctcctgcccccaagaatggctccagctccgattcctccgtgggggagaaactgggagccgcggccgccgacgctgtgaccggcaggaccgaggagtacaggcgccgccgccacactatggacaaggacagccgtggggcggccgcgaccactaccaccactgagcaccgcttcttccgccggagcgtcatctgcgactccaatgccactgcactggagcttcccggccttcctctttccctgccccagcccagcatccccgcggctgtcccgcagagtgctccaccggagccccaccgggaagagaccgtgaccgccaccgccacttcccaggtagcccagcagcctccagccgctgccgcccctggggaacaggccgtcgcgggccctgccccctcgactgtccccagcagtaccagcaaagaccgcccagtgtcccagcctagccttgtggggagcaaagaggagccgccgccggcgagaagtggcagcggcggcggcagcgccaaggagccacaggaggaacggagccagcagcaggatgatatcgaagagctggagaccaaggccgtgggaatgtctaacgatggccgctttctcaagtttgacatcgaaatcggcagaggctcctttaagacggtctacaaaggtctggacactgaaaccaccgtggaagtcgcctggtgtgaactgcaggatcgaaaattaacaaagtctgagaggcagagatttaaagaagaagctgaaatgttaaaaggtcttcagcatcccaatattgttagattttatgattcctgggaatccacagtaaaaggaaagaagtgcattgttttggtgactgaacttatgacgtctggaacacttaaaacgtatctgaaaaggtttaaagtgatgaagatcaaagttctaagaagctggtgccgtcagatccttaaaggtcttcagtttcttcatactcgaactccacctatcattcaccgcgatcttaaatgtgacaacatctttatcaccggccctactggctcagtcaagattggagacctcggtctggcaaccctgaagcgggcttcttttgccaagagtgtgataggtaccccagagttcatggcccctgagatgtatgaggagaaatatgatgaatccgttgacgtttatgcttttgggatgtgcatgcttgagatggctacatctgaatatccttactcggagtgccaaaatgctgcacagatctaccgtcgcgtgaccagtggggtgaagccagccagttttgacaaagtagcaattcctgaagtgaaggaaattattgaaggatgcatacgacaaaacaaagatgaaagatattccatcaaagaccttttgaaccatgccttcttccaagaggaaacaggagtacgggtagaattagcagaagaagatgatggagaaaaaatagccataaaattatggctacgtattgaagatattaagaaattaaagggaaaatacaaagataatgaagctattgagttttcttttgatttagagagagatgtcccagaagatgttgcacaagaaatggtagagtctgggtatgtctgtgaaggtgatcacaagaccatggctaaagctatcaaagacagagtatcattaattaagaggaaacgagagcagcggcagttggtacgggaggagcaagaaaaaaaaaagcaggaagagagcagtctcaaacagcaggtagaacaatccagtgcttcccagacaggaatcaagcagctcccttctgctagcaccggcatacctactgcttctaccacttcagcttcagtttctacacaagtagaacctgaagaacctgaggcagatcaacatcaacaactacagtaccagcaacccagtatatctgtgttatctgatgggacggttgacagtggtcagggatcctctgtcttcacagaatctcgagtgagcagccaacagacagtttcatatggttcccaacatgaacaggcacattctacaggcacagtcccagggcatataccttctactgtccaagcacagtctcagccccatggggtatatccaccctcaagtgtggcacaggggcagagccagggtcagccatcctcaagtagcttaacaggggtttcatcttcccaacccatacaacatcctcagcagcagcagggaatacagcagacagcccctcctcaacagacagtgcagtattcactttcacagacatcaacctccagtgaggccactactgcacagccagtgagtcagcctcaagctccacaagtcttgcctcaagtatcagctggaaaacagcttccagtttcccagccagtaccaactatccaaggcgaacctcagatcccagttgcgacacaaccctcggttgttccagtccactctggtgctcatttccttccagtgggacagccgctccctactcccttgctccctcagtaccctgtctctcagattcccatatcaactcctcatgtgtctacggctcagacaggtttctcatcccttcccatcacaatggcagctggcattactcagcctctgctcacgttggcttcatctgctacaacagctgcgatcccgggggtatcaactgtggttcctagtcagcttccaacccttctgcagcctgtgactcagctgccaagtcaggttcacccacagctcctacaaccagcagttcagtccatgggaataccagctaaccttggacaagctgctgaggttccactttcctctggagatgttctgtaccagggcttcccacctcgactgccaccacagtacccaggagattcaaatattgctccctcttccaacgtggcttctgtttgcatccattctacagtcctawcccctcccatgccgacagaagtactggctacacctgggtactttcccacagtggtgcagccttatgtggaatcaaatcttttagttcctatgggtggtgtaggaggacaggttcaagtgtcccagccaggagggagtttagcacaagcccccactacatcctcccagcaagcagttttggagagtactcagggagtctctcaggttgctcctgcagagccagttgcagtagcacagccccaagctacccagccgaccactttggcttcctctgtagacagtgcacattcagatgttgcttcaggtatgagtgatggcaatgagaacgtcccatcttccagtggaaggcatgaaggaagaactacaaaacggcattaccgaaaatctgtaaggagtcgctctcgacatgaaaaaacttcacgcccaaaattaagaattttgaatgtttcaaataaaggagaccgagtagtagaatgtcaattagagactcataataggaaaatggttacattcaaatttgacctagatggtgacaaccccgaggagatagcaacaattatggtgaacaatgactttattctagcaatagagagagagtcgtttgtggatcaagtgcgagaaattattgaaaaagctgatgaaatgctcagtgaggatgtcagtgtggaaccagagggtgatcagggattggagagtctacaaggaaaggatgactatggcttttcaggttctcagaaattggaaggagagttcaaacaaccaattcctgcgtcttccatgccacagcaaataggcattcctaccagttctttaactcaagttgttcattctgcgggaaggcggtttatagtgagtcctgtgccagaaagccgattacgagaatcaaaagttttccccagtgaaataacagatacagttgctgcctctacagctcagagccctggaatgaacttgtctcactctgcatcatcccttagtctacaacaggccttttctgaacttagacgtgcccaaatgacagaaggacccaayacagcacctccaaactttagtcatacaggaccaacatttccagtagtacctcctttcttaagtagcattgctggagtcccaaccacagcagcagccacagcaccagtccctgcaacaagcagccctcctaatgacatttccacatcagtaattcagtctgaggttacagtgcccactgaagaggggattgctggagttgccaccagcacaggtgtggtaacttcaggtggtctccccataccacctgtgtctgaatcaccagtactttccagcgtagtttcaagtatcacaatacctgcagttgtctcaatatctactacatccccgtcacttcaagtccccacatccacatctgagatcgttgtttctagtacagcactgtatccttcagtaacagtttcagcaacttcagcctctgcagggggcagtactgctaccccaggtcctaagcctccagctgtagtatctcagcaggcagcaggcagcactactgtgggagccacattaacatcagtttctaccaccacttcattcccaagcacagcttcacagctgtccattcagcttagcagcagtacttctactcctactttagctgaaaccgtggtagttagcgcacactcactagataagacatctcatagcagtacaactggattggctttctccctctctgcaccatcttcctcttcctctcctggagcaggagtgtctagttatatttctcagcctggtgggctgcatcctttggtcattccatcagtgatagcttctactcctattcttccccaagcagcaggacctacttctacacctttattaccccaagtacctagtatcccacccttggtacagcctgttgccaatgtgcctgctgtacagcagacactaattcatagtcagcctcaaccagctttgcttcccaaccagccccatactcattgtcctgaagtagattctgatacacaacccaaagctcctggaattgatgacataaagactctagaagaaaagctgcggtctctgttcagtgaacacagctcatctggagctcagcatgcctctgtctcactggagacctcactagtcatagagagcactgtcacaccaggcatcccaactactgctgttgcaccaagcaaactcctgacttctaccacaagtacttgcttaccaccaaccaatttaccactaggaacagttgctttgccagttacaccagtggtcacacctgggcaagtttctaccccagtcagcactactacatcaggagtgaaacctggaactgctccctccaagccacctctaactaaggctccggtgctgccagtgggtactgaacttccagcaggtactctacccagcgagcagctgccaccttttccaggaccttctctaacccagtcccagcaacctctagaggatcttgatgctcaattgagaagaacacttagtccagagatkatcacagtgacttctgcggttggtcctgtgtccatggcggctccaacagcaatcacagaagcaggaacacagcctcagaagggtgtttctcaagtcaaagaaggccctgtcctagcaactagttcaggagctggtgtttttaagatgggacgatttcaggtttctgttgcagcagacggtgcccagaaagagggtaaaaataagtcagaagatgcaaagtctgttcattttgaatccagcacctcagagtcctcagtgctatcaagtagtagtccagagagtaccttggtgaaaccagagccgaatggcataaccatccctggtatctcttcagatgtgccagagagtgcccacaaaactactgcctcagaggcaaagtcagacactgggcagcctaccaaggttggacgttttcaggtgacaactacagcaaacaaagtgggtcgtttctctgtatcaaaaactgaggacaagatcactgacacaaagaaagaaggaccagtggcatctcctccttttatggatttggaacaagctgttcttcctgctgtgataccaaagaaagagaagcctgaactgtcagagccttcacatctaaatgggccgtcttctgacccggaggccgcttttttaagtagggatgtggatgatggttccggtagtccacactcgccccatcagctgagctcaaagagccttcctagccagaatctaagtcaaagccttagtaattcatttaactcctcttacatgagtagcgacaatgagtcagatatcgaagatgaagacttaaagttagagctgcgacgactacgagataaacatctcaaagagattcaggacctgcagagtcgccagaagcatgaaattgaatctttgtataccaaactgggcaaggtgccccctgctgttattattcccccagctgctcccctttcagggagaagacgacgacccactaaaagcaaaggcagcaaatctagtcgaagcagttccttggggaataaaagcccccagctttcaggtaacctgtctggtcagagtgcagcttcagtcttgcacccccagcagaccctccaccctcctggcaacatcccagagtccgggcagaatcagctgttacagccccttaagccatctccctccagtgacaacctctattcagccttcaccagtgatggtgccatttcagtaccaagcctttctgctccaggtcaaggaaccagcagcacaaacactgttggggcaacagtgaacagccaagccgcccaagctcagcctcctgccatgacgtccagcaggaagggcacattcacagatgacttgcacaagttggtagacaattgggcccgagatgccatgaatctctcaggcaggagaggaagcaaagggcacatgaattatgagggccctggaatggcaaggaagttctctgcacctgggcaactgtgcatctccatgacctcgaacctgggtggctctgcccccatctctgcagcatcagctacctctctaggtcacttcaccaagtctatgtgccccccacagcagtatggctttccagctaccccatttggcgctcaatggagtgggacgggtggcccagcaccacagccacttggccagttccaacctgtgggaactgcctccttgcagaatttcaacatcagcaatttgcagaaatccatcagcaaccccccaggctccaacctgcggaccacttag

SEQ ID NO: 92 - protein, 2382 aa, Homo Sapiens
  VARIANT 977, 1808: Xaa = Any Amino Acid
MSGGAAEKQSSTPGSLFLSPPAPAPKNGSSSDSSVGEKLGAAAADAVTGRTEEYRRRRHTMDKDSRGAAATTTTTEHRFFRRSVICDSNATALELPGLPLSLPQPSIPAAVPQSAPPEPHREETVTATATSQVAQQPPAAAAPGEQAVAGPAPSTVPSSTSKDRPVSQPSLVGSKEEPPPARSGSGGGSAKEPQEERSQQQDDIEELETKAVGMSNDGRFLKFDIEIGRGSFKTVYKGLDTETTVEVAWCELQDRKLTKSERQRFKEEAEMLKGLQHPNIVRFYDSWESTVKGKKCIVLVTELMTSGTLKTYLKRFKVMKIKVLRSWCRQILKGLQFLHTRTPPIIHRDLKCDNIFITGPTGSVKIGDLGLATLKRASFAKSVIGTPEFMAPEMYEEKYDESVDVYAFGMCMLEMATSEYPYSECQNAAQIYRRVTSGVKPASFDKVAIPEVKEIIEGCIRQNKDERYSIKDLLNHAFFQEETGVRVELAEEDDGEKIAIKLWLRIEDIKKLKGKYKDNEAIEFSFDLERDVPEDVAQEMVESGYVCEGDHKTMAKAIKDRVSLIKRKREQRQLVREEQEKKKQEESSLKQQVEQSSASQTGIKQLPSASTGIPTASTTSASVSTQVEPEEPEADQHQQLQYQQPSISVLSDGTVDSGQGSSVFTESRVSSQQTVSYGSQHEQAHSTGTVPGHIPSTVQAQSQPHGVYPPSSVAQGQSQGQPSSSSLTGVSSSQPIQHPQQQQGIQQTAPPQQTVQYSLSQTSTSSEATTAQPVSQPQAPQVLPQVSAGKQLPVSQPVPTIQGEPQIPVATQPSVVPVHSGAHFLPVGQPLPTPLLPQYPVSQIPISTPHVSTAQTGFSSLPITMAAGITQPLLTLASSATTAAIPGVSTVVPSQLPTLLQPVTQLPSQVHPQLLQPAVQSMGIPANLGQAAEVPLSSGDVLYQGFPPRLPPQYPGDSNIAPSSNVASVCIHSTVLXPPMPTEVLATPGYFPTVVQPYVESNLLVPMGGVGGQVQVSQPGGSLAQAPTTSSQQAVLESTQGVSQVAPAEPVAVAQPQATQPTTLASSVDSAHSDVASGMSDGNENVPSSSGRHEGRTTKRHYRKSVRSRSRHEKTSRPKLRILNVSNKGDRVVECQLETHNRKMVTFKFDLDGDNPEEIATIMVNNDFILAIERESFVDQVREIIEKADEMLSEDVSVEPEGDQGLESLQGKDDYGFSGSQKLEGEFKQPIPASSMPQQIGIPTSSLTQVVHSAGRRFIVSPVPESRLRESKVFPSEITDTVAASTAQSPGMNLSHSASSLSLQQAFSELRRAQMTEGPNTAPPNFSHTGPTFPVVPPFLSSIAGVPTTAAATAPVPATSSPPNDISTSVIQSEVTVPTEEGIAGVATSTGVVTSGGLPIPPVSESPVLSSVVSSITIPAVVSISTTSPSLQVPTSTSEIVVSSTALYPSVTVSATSASAGGSTATPGPKPPAVVSQQAAGSTTVGATLTSVSTTTSFPSTASQLSIQLSSSTSTPTLAETVVVSAHSLDKTSHSSTTGLAFSLSAPSSSSSPGAGVSSYISQPGGLHPLVIPSVIASTPILPQAAGPTSTPLLPQVPSIPPLVQPVANVPAVQQTLIHSQPQPALLPNQPHTHCPEVDSDTQPKAPGIDDIKTLEEKLRSLFSEHSSSGAQHASVSLETSLVIESTVTPGIPTTAVAPSKLLTSTTSTCLPPTNLPLGTVALPVTPVVTPGQVSTPVSTTTSGVKPGTAPSKPPLTKAPVLPVGTELPAGTLPSEQLPPFPGPSLTQSQQPLEDLDAQLRRTLSPEXITVTSAVGPVSMAAPTAITEAGTQPQKGVSQVKEGPVLATSSGAGVFKMGRFQVSVAADGAQKEGKNKSEDAKSVHFESSTSESSVLSSSSPESTLVKPEPNGITIPGISSDVPESAHKTTASEAKSDTGQPTKVGRFQVTTTANKVGRFSVSKTEDKITDTKKEGPVASPPFMDLEQAVLPAVIPKKEKPELSEPSHLNGPSSDPEAAFLSRDVDDGSGSPHSPHQLSSKSLPSQNLSQSLSNSFNSSYMSSDNESDIEDEDLKLELRRLRDKHLKEIQDLQSRQKHEIESLYTKLGKVPPAVIIPPAAPLSGRRRRPTKSKGSKSSRSSSLGNKSPQLSGNLSGQSAASVLHPQQTLHPPGNIPESGQNQLLQPLKPSPSSDNLYSAFTSDGAISVPSLSAPGQGTSSTNTVGATVNSQAAQAQPPAMTSSRKGTFTDDLHKLVDNWARDAMNLSGRRGSKGHMNYEGPGMARKFSAPGQLCISMTSNLGGSAPISAASATSLGHFTKSMCPPQQYGFPATPFGAQWSGTGGPAPQPLGQFQPVGTASLQNFNISNLQKSISNPPGSNLRTT

SEQ ID NO: 93 - DNA, 6738 bp, Homo Sapiens
  CDS (1)...(6738)
atgtctggcggcgccgcagagaagcagagcagcactcccggttccctgttcctctcgccgccggctcctgcccccaagaatggctccagctccgattcctccgtgggggagaaactgggagccgcggccgccgacgctgtgaccggcaggaccgaggagtacaggcgccgccgccacactatggacaaggacagccgtggggcggccgcgaccactaccaccactgagcaccgcttcttccgccggagcgtcatctgcgactccaatgccactgcactggagcttcccggccttcctctttccctgccccagcccagcatccccgcggctgtcccgcagagtgctccaccggagccccaccgggaagagaccgtgaccgccaccgccacttcccaggtagcccagcagcctccagccgctgccgcccctggggaacaggccgtcgcgggccctgccccctcgactgtccccagcagtaccagcaaagaccgcccagtgtcccagcctagccttgtggggagcaaagaggagccgccgccggcgagaagtggcagcggcggcggcagcgccaaggagccacaggaggaacggagccagcagcaggatgatatcgaagagctggagaccaaggccgtgggaatgtctaacgatggccgctttctcaagtttgacatcgaaatcggcagaggctcctttaagacggtctacaaaggtctggacactgaaaccaccgtggaagtcgcctggtgtgaactgcaggatcgaaaattaacaaagtctgagaggcagagatttaaagaagaagctgaaatgttaaaaggtcttcagcatcccaatattgttagattttatgattcctgggaatccacagtaaaaggaaagaagtgcattgttttggtgactgaacttatgacgtctggaacacttaaaacgtatctgaaaaggtttaaagtgatgaagatcaaagttctaagaagctggtgccgtcagatccttaaaggtcttcagtttcttcatactcgaactccacctatcattcaccgcgatcttaaatgtgacaacatctttatcaccggccctactggctcagtcaagattggagacctcggtctggcaaccctgaagcgggcttcttttgccaagagtgtgataggtaccccagagttcatggcccctgagatgtatgaggagaaatatgatgaatccgttgacgtttatgcttttgggatgtgcatgcttgagatggctacatctgaatatccttactcggagtgccaaaatgctgcacagatctaccgtcgcgtgaccagtggggtgaagccagccagttttgacaaagtagcaattcctgaagtgaaggaaattattgaaggatgcatacgacaaaacaaagatgaaagatattccatcaaagaccttttgaaccatgccttcttccaagaggaaacaggagtacgggtagaattagcagaagaagatgatggagaaaaaatagccataaaattatggctacgtattgaagatattaagaaattaaagggaaaatacaaagataatgaagctattgagttttcttttgatttagagagagatgtcccagaagatgttgcacaagaaatggtagagtctgggtatgtctgtgaaggtgatcacaagaccatggctaaagctatcaaagacagagtatcattaattaagaggaaacgagagcagcggcagttggtacgggaggagcaagaaaaaaaaaagcaggaagagagcagtctcaaacagcaggtagaacaatccagtgcttcccagacaggaatcaagcagctcccttctgctagcaccggcatacctactgcttctaccacttcagcttcagtttctacacaagtagaacctgaagaacctgaggcagatcaacatcaacaactacagtaccagcaacccagtatatctgtgttatctgatgggacggttgacagtggtcagggatcctctgtcttcacagaatctcgagtgagcagccaacagacagtttcatatggttcccaacatgaacaggcacattctacaggcacagtcccagggcatataccttctactgtccaagcacagtctcagccccatggggtatatccaccctcaagtgtggcacaggggcagagccagggtcagccatcctcaagtagcttaacaggggtttcatcttcccaacccatacaacatcctcagcagcagcagggaatacagcagacagcccctcctcaacagacagtgcagtattcactttcacagacatcaacctccagtgaggccactactgcacagccagtgagtcagcctcaagctccacaagtcttgcctcaagtatcagctggaaaacagcttccagtttcccagccagtaccaactatccaaggcgaacctcagatcccagttgcgacacaaccctcggttgttccagtccactctggtgctcatttccttccagtgggacagccgctccctactcccttgctccctcagtaccctgtctctcagattcccatatcaactcctcatgtgtctacggctcagacaggtttctcatcccttcccatcacaatggcagctggcattactcagcctctgctcacgttggcttcatctgctacaacagctgcgatcccgggggtatcaactgtggttcctagtcagcttccaacccttctgcagcctgtgactcagctgccaagtcaggttcacccacagctcctacaaccagcagttcagtccatgggaataccagctaaccttggacaagctgctgaggttccactttcctctggagatgttctgtaccagggcttcccacctcgactgccaccacagtacccaggagattcaaatattgctccctcttccaacgtggcttctgtttgcatccattctacagtcctawcccctcccatgccgacagaagtactggctacacctgggtactttcccacagtggtgcagccttatgtggaatcaaatcttttagttcctatgggtggtgtaggaggacaggttcaagtgtcccagccaggagggagtttagcacaagcccccactacatcctcccagcaagcagttttggagagtactcagggagtctctcaggttgctcctgcagagccagttgcagtagcacagccccaagctacccagccgaccactttggcttcctctgtagacagtgcacattcagatgttgcttcaggtatgagtgatggcaatgagaacgtcccatcttccagtggaaggcatgaaggaagaactacaaaacggcattaccgaaaatctgtaaggagtcgctctcgacatgaaaaaacttcacgcccaaaattaagaattttgaatgtttcaaataaaggagaccgagtagtagaatgtcaattagagactcataataggaaaatggttacattcaaatttgacctagatggtgacaaccccgaggagatagcaacaattatggtgaacaatgactttattctagcaatagagagagagtcgtttgtggatcaagtgcgagaaattattgaaaaagctgatgaaatgctcagtgaggatgtcagtgtggaaccagagggtgatcagggattggagagtctacaaggaaaggatgactatggcttttcaggttctcagaaattggaaggagagttcaaacaaccaattcctgcgtcttccatgccacagcaaataggcattcctaccagttctttaactcaagttgttcattctgcgggaaggcggtttatagtgagtcctgtgccagaaagccgattacgagaatcaaaagttttccccagtgaaataacagatacagttgctgcctctacagctcagagccctggaatgaacttgtctcactctgcatcatcccttagtctacaacaggccttttctgaacttagacgtgcccaaatgacagaaggacccaayacagcacctccaaactttagtcatacaggaccaacatttccagtagtacctcctttcttaagtagcattgctggagtcccaaccacagcagcagccacagcaccagtccctgcaacaagcagccctcctaatgacatttccacatcagtaattcagtctgaggttacagtgcccactgaagaggggattgctggagttgccaccagcacaggtgtggtaacttcaggtggtctccccataccacctgtgtctgaatcaccagtactttccagcgtagtttcaagtatcacaatacctgcagttgtctcaatatctactacatccccgtcacttcaagtccccacatccacatctgagatcgttgtttctagtacagcactgtatccttcagtaacagtttcagcaacttcagcctctgcagggggcagtactgctaccccaggtcctaagcctccagctgtagtatctcagcaggcagcaggcagcactactgtgggagccacattaacatcagtttctaccaccacttcattcccaagcacagcttcacagctgtccattcagcttagcagcagtacttctactcctactttagctgaaaccgtggtagttagcgcacactcactagataagacatctcatagcagtacaactggattggctttctccctctctgcaccatcttcctcttcctctcctggagcaggagtgtctagttatatttctcagcctggtgggctgcatcctttggtcattccatcagtgatagcttctactcctattcttccccaagcagcaggacctacttctacacctttattaccccaagtacctagtatcccacccttggtacagcctgttgccaatgtgcctgctgtacagcagacactaattcatagtcagcctcaaccagctttgcttcccaaccagccccatactcattgtcctgaagtagattctgatacacaacccaaagctcctggaattgatgacataaagactctagaagaaaagctgcggtctctgttcagtgaacacagctcatctggagctcagcatgcctctgtctcactggagacctcactagtcatagagagcactgtcacaccaggcatcccaactactgctgttgcaccaagcaaactcctgacttctaccacaagtacttgcttaccaccaaccaatttaccactaggaacagttgctttgccagttacaccagtggtcacacctgggcaagtttctaccccagtcagcactactacatcaggagtgaaacctggaactgctccctccaagccacctctaactaaggctccggtgctgccagtgggtactgaacttccagcaggtactctacccagcgagcagctgccaccttttccaggaccttctctaacccagtcccagcaacctctagaggatcttgatgctcaattgagaagaacacttagtccagagatkatcacagtgacttctgcggttggtcctgtgtccatggcggctccaacagcaatcacagaagcaggaacacagcctcagaagggtgtttctcaagtcaaagaaggccctgtcctagcaactagttcaggagctggtgtttttaagatgggacgatttcaggtttctgttgcagcagacggtgcccagaaagagggtaaaaataagtcagaagatgcaaagtctgttcattttgaatccagcacctcagagtcctcagtgctatcaagtagtagtccagagagtaccttggtgaaaccagagccgaatggcataaccatccctggtatctcttcagatgtgccagagagtgcccacaaaactactgcctcagaggcaaagtcagacactgggcagcctaccaaggttggacgttttcaggtgacaactacagcaaacaaagtgggtcgtttctctgtatcaaaaactgaggacaagatcactgacacaaagaaagaaggaccagtggcatctcctccttttatggatttggaacaagctgttcttcctgctgtgataccaaagaaagagaagcctgaactgtcagagccttcacatctaaatgggccgtcttctgacccggaggccgcttttttaagtagggatgtggatgatggttccggtagtccacactcgccccatcagctgagctcaaagagccttcctagccagaatctaagtcaaagccttagtaattcatttaactcctcttacatgagtagcgacaatgagtcagatatcgaagatgaagacttaaagttagagctgcgacgactacgagataaacatctcaaagagattcaggacctgcagagtcgccagaagcatgaaattgaatctttgtataccaaactgggcaaggtgccccctgctgttattattcccccagctgctcccctttcagggagaagacgacgacccactaaaagcaaaggcagcaaatctagtcgaagcagttccttggggaataaaagcccccagctttcaggtaacctgtctggtcagagtgcagcttcagtcttgcacccccagcagaccctccaccctcctggcaacatcccagagtccgggcagaatcagctgttacagccccttaagccatctccctccagtgacaacctctattcagccttcaccagtgatggtgccatttcagtaccaagcctttctgctccaggtcaaggaataaagcaaccatcatcgtccaaaaacaataaaatggagatgttgccatacctgggacaaaagcctgttaaggcgggttgggagactagctga

SEQ ID NO: 94 - protein, 2245 aa, Homo Sapiens
  VARIANT 977, 1808: Xaa = Any Amino Acid
MSGGAAEKQSSTPGSLFLSPPAPAPKNGSSSDSSVGEKLGAAAADAVTGRTEEYRRRRHTMDKDSRGAAATTTTTEHRFFRRSVICDSNATALELPGLPLSLPQPSIPAAVPQSAPPEPHREETVTATATSQVAQQPPAAAAPGEQAVAGPAPSTVPSSTSKDRPVSQPSLVGSKEEPPPARSGSGGGSAKEPQEERSQQQDDIEELETKAVGMSNDGRFLKFDIEIGRGSFKTVYKGLDTETTVEVAWCELQDRKLTKSERQRFKEEAEMLKGLQHPNIVRFYDSWESTVKGKKCIVLVTELMTSGTLKTYLKRFKVMKIKVLRSWCRQILKGLQFLHTRTPPIIHRDLKCDNIFITGPTGSVKIGDLGLATLKRASFAKSVIGTPEFMAPEMYEEKYDESVDVYAFGMCMLEMATSEYPYSECQNAAQIYRRVTSGVKPASFDKVAIPEVKEIIEGCIRQNKDERYSIKDLLNHAFFQEETGVRVELAEEDDGEKIAIKLWLRIEDIKKLKGKYKDNEAIEFSFDLERDVPEDVAQEMVESGYVCEGDHKTMAKAIKDRVSLIKRKREQRQLVREEQEKKKQEESSLKQQVEQSSASQTGIKQLPSASTGIPTASTTSASVSTQVEPEEPEADQHQQLQYQQPSISVLSDGTVDSGQGSSVFTESRVSSQQTVSYGSQHEQAHSTGTVPGHIPSTVQAQSQPHGVYPPSSVAQGQSQGQPSSSSLTGVSSSQPIQHPQQQQGIQQTAPPQQTVQYSLSQTSTSSEATTAQPVSQPQAPQVLPQVSAGKQLPVSQPVPTIQGEPQIPVATQPSVVPVHSGAHFLPVGQPLPTPLLPQYPVSQIPISTPHVSTAQTGFSSLPITMAAGITQPLLTLASSATTAAIPGVSTVVPSQLPTLLQPVTQLPSQVHPQLLQPAVQSMGIPANLGQAAEVPLSSGDVLYQGFPPRLPPQYPGDSNIAPSSNVASVCIHSTVLXPPMPTEVLATPGYFPTVVQPYVESNLLVPMGGVGGQVQVSQPGGSLAQAPTTSSQQAVLESTQGVSQVAPAEPVAVAQPQATQPTTLASSVDSAHSDVASGMSDGNENVPSSSGRHEGRTTKRHYRKSVRSRSRHEKTSRPKLRILNVSNKGDRVVECQLETHNRKMVTFKFDLDGDNPEEIATIMVNNDFILAIERESFVDQVREIIEKADEMLSEDVSVEPEGDQGLESLQGKDDYGFSGSQKLEGEFKQPIPASSMPQQIGIPTSSLTQVVHSAGRRFIVSPVPESRLRESKVFPSEITDTVAASTAQSPGMNLSHSASSLSLQQAFSELRRAQMTEGPNTAPPNFSHTGPTFPVVPPFLSSIAGVPTTAAATAPVPATSSPPNDISTSVIQSEVTVPTEEGIAGVATSTGVVTSGGLPIPPVSESPVLSSVVSSITIPAVVSISTTSPSLQVPTSTSEIVVSSTALYPSVTVSATSASAGGSTATPGPKPPAVVSQQAAGSTTVGATLTSVSTTTSFPSTASQLSIQLSSSTSTPTLAETVVVSAHSLDKTSHSSTTGLAFSLSAPSSSSSPGAGVSSYISQPGGLHPLVIPSVIASTPILPQAAGPTSTPLLPQVPSIPPLVQPVANVPAVQQTLIHSQPQPALLPNQPHTHCPEVDSDTQPKAPGIDDIKTLEEKLRSLFSEHSSSGAQHASVSLETSLVIESTVTPGIPTTAVAPSKLLTSTTSTCLPPTNLPLGTVALPVTPVVTPGQVSTPVSTTTSGVKPGTAPSKPPLTKAPVLPVGTELPAGTLPSEQLPPFPGPSLTQSQQPLEDLDAQLRRTLSPEXITVTSAVGPVSMAAPTAITEAGTQPQKGVSQVKEGPVLATSSGAGVFKMGRFQVSVAADGAQKEGKNKSEDAKSVHFESSTSESSVLSSSSPESTLVKPEPNGITIPGISSDVPESAHKTTASEAKSDTGQPTKVGRFQVTTTANKVGRFSVSKTEDKITDTKKEGPVASPPFMDLEQAVLPAVIPKKEKPELSEPSHLNGPSSDPEAAFLSRDVDDGSGSPHSPHQLSSKSLPSQNLSQSLSNSFNSSYMSSDNESDIEDEDLKLELRRLRDKHLKEIQDLQSRQKHEIESLYTKLGKVPPAVIIPPAAPLSGRRRRPTKSKGSKSSRSSSLGNKSPQLSGNLSGQSAASVLHPQQTLHPPGNIPESGQNQLLQPLKPSPSSDNLYSAFTSDGAISVPSLSAPGQGIKQPSSSKNNKMEMLPYLGQKPVKAGWETS

SEQ ID NO: 95 - DNA, 2949 bp, Homo Sapiens
  CDS (1)...(2949)
atgtctggcggcgccgcagagaagcagagcagcactcccggttccctgttcctctcgccgccggctcctgcccccaagaatggctccagctccgattcctccgtgggggagaaactgggagccgcggccgccgacgctgtgaccggcaggaccgaggagtacaggcgccgccgccacactatggacaaggacagccgtggggcggccgcgaccactaccaccactgagcaccgcttcttccgccggagcgtcatctgcgactccaatgccactgcactggagcttcccggccttcctctttccctgccccagcccagcatccccgcggctgtcccgcagagtgctccaccggagccccaccgggaagagaccgtgaccgccaccgccacttcccaggtagcccagcagcctccagccgctgccgcccctggggaacaggccgtcgcgggccctgccccctcgactgtccccagcagtaccagcaaagaccgcccagtgtcccagcctagccttgtggggagcaaagaggagccgccgccggcgagaagtggcagcggcggcggcagcgccaaggagccacaggaggaacggagccagcagcaggatgatatcgaagagctggagaccaaggccgtgggaatgtctaacgatggccgctttctcaagtttgacatcgaaatcggcagaggctcctttaagacggtctacaaaggtctggacactgaaaccaccgtggaagtcgcctggtgtgaactgcaggatcgaaaattaacaaagtctgagaggcagagatttaaagaagaagctgaaatgttaaaaggtcttcagcatcccaatattgttagattttatgattcctgggaatccacagtaaaaggaaagaagtgcattgttttggtgactgaacttatgacgtctggaacacttaaaacgtatctgaaaaggtttaaagtgatgaagatcaaagttctaagaagctggtgccgtcagatccttaaaggtcttcagtttcttcatactcgaactccacctatcattcaccgcgatcttaaatgtgacaacatctttatcaccggccctactggctcagtcaagattggagacctcggtctggcaaccctgaagcgggcttcttttgccaagagtgtgataggtaccccagagttcatggcccctgagatgtatgaggagaaatatgatgaatccgttgacgtttatgcttttgggatgtgcatgcttgagatggctacatctgaatatccttactcggagtgccaaaatgctgcacagatctaccgtcgcgtgaccagtggggtgaagccagccagttttgacaaagtagcaattcctgaagtgaaggaaattattgaaggatgcatacgacaaaacaaagatgaaagatattccatcaaagaccttttgaaccatgccttcttccaagaggaaacaggagtacgggtagaattagcagaagaagatgatggagaaaaaatagccataaaattatggctacgtattgaagatattaagaaattaaagggaaaatacaaagataatgaagctattgagttttcttttgatttagagagagatgtcccagaagatgttgcacaagaaatggtagagtctgggtatgtctgtgaaggtgatcacaagaccatggctaaagctatcaaagacagagtatcattaattaagaggaaacgagagcagcggcagttggtacgggaggagcaagaaaaaaaaaagcaggaagagagcagtctcaaacagcaggtagaacaatccagtgcttcccagacaggaatcaagcagctcccttctgctagcaccggcatacctactgcttctaccacttcagcttcagtttctacacaagtagaacctgaagaacctgaggcagatcaacatcaacaactacagtaccagcaacccagtatatctgtgttatctgatgggacggttgacagtggtcagggatcctctgtcttcacagaatctcgagtgagcagccaacagacagtttcatatggttcccaacatgaacaggcacattctacaggcacagtcccagggcatataccttctactgtccaagcacagtctcagccccatggggtatatccaccctcaagtgtggcacaggggcagagccagggtcagccatcctcaagtagcttaacaggggtttcatcttcccaacccatacaacatcctcagcagcagcagggaatacagcagacagcccctcctcaacagacagtgcagtattcactttcacagacatcaacctccagtgaggccactactgcacagccagtgagtcagcctcaagctccacaagtcttgcctcaagtatcagctggaaaacagcttccagtttcccagccagtaccaactatccaaggcgaacctcagatcccagttgcgacacaaccctcggttgttccagtccactctggtgctcatttccttccagtgggacagccgctccctactcccttgctccctcagtaccctgtctctcagattcccatatcaactcctcatgtgtctacggctcagacaggtttctcatcccttcccatcacaatggcagctggcattactcagcctctgctcacgttggcttcatctgctacaacagctgcgatcccgggggtatcaactgtggttcctagtcagcttccaacccttctgcagcctgtgactcagctgccaagtcaggttcacccacagctcctacaaccagcagttcagtccatgggaataccagctaaccttggacaagctgctgaggttccactttcctctggagatgttctgtaccagggcttcccacctcgactgccaccacagtacccaggagattcaaatattgctccctcttccaacgtggcttctgtttgcatccattctacagtcctawcccctataccttctgcataa

SEQ ID NO: 96 - protein, 982 aa, Homo Sapiens
  VARIANT 977: Xaa = Any Amino Acid
MSGGAAEKQSSTPGSLFLSPPAPAPKNGSSSDSSVGEKLGAAAADAVTGRTEEYRRRRHTMDKDSRGAAATTTTTEHRFFRRSVICDSNATALELPGLPLSLPQPSIPAAVPQSAPPEPHREETVTATATSQVAQQPPAAAAPGEQAVAGPAPSTVPSSTSKDRPVSQPSLVGSKEEPPPARSGSGGGSAKEPQEERSQQQDDIEELETKAVGMSNDGRFLKFDIEIGRGSFKTVYKGLDTETTVEVAWCELQDRKLTKSERQRFKEEAEMLKGLQHPNIVRFYDSWESTVKGKKCIVLVTELMTSGTLKTYLKRFKVMKIKVLRSWCRQILKGLQFLHTRTPPIIHRDLKCDNIFITGPTGSVKIGDLGLATLKRASFAKSVIGTPEFMAPEMYEEKYDESVDVYAFGMCMLEMATSEYPYSECQNAAQIYRRVTSGVKPASFDKVAIPEVKEIIEGCIRQNKDERYSIKDLLNHAFFQEETGVRVELAEEDDGEKIAIKLWLRIEDIKKLKGKYKDNEAIEFSFDLERDVPEDVAQEMVESGYVCEGDHKTMAKAIKDRVSLIKRKREQRQLVREEQEKKKQEESSLKQQVEQSSASQTGIKQLPSASTGIPTASTTSASVSTQVEPEEPEADQHQQLQYQQPSISVLSDGTVDSGQGSSVFTESRVSSQQTVSYGSQHEQAHSTGTVPGHIPSTVQAQSQPHGVYPPSSVAQGQSQGQPSSSSLTGVSSSQPIQHPQQQQGIQQTAPPQQTVQYSLSQTSTSSEATTAQPVSQPQAPQVLPQVSAGKQLPVSQPVPTIQGEPQIPVATQPSVVPVHSGAHFLPVGQPLPTPLLPQYPVSQIPISTPHVSTAQTGFSSLPITMAAGITQPLLTLASSATTAAIPGVSTVVPSQLPTLLQPVTQLPSQVHPQLLQPAVQSMGIPANLGQAAEVPLSSGDVLYQGFPPRLPPQYPGDSNIAPSSNVASVCIHSTVLXPIPSA

SEQ ID NO: 97 - DNA, 6690 bp, Homo Sapiens
  CDS (1)...(6690)
atgtctggcggcgccgcagagaagcagagcagcactcccggttccctgttcctctcgccgccggctcctgcccccaagaatggctccagctccgattcctccgtgggggagaaactgggagccgcggccgccgacgctgtgaccggcaggaccgaggagtacaggcgccgccgccacactatggacaaggacagccgtggggcggccgcgaccactaccaccactgagcaccgcttcttccgccggagcgtcatctgcgactccaatgccactgcactggagcttcccggccttcctctttccctgccccagcccagcatccccgcggctgtcccgcagagtgctccaccggagccccaccgggaagagaccgtgaccgccaccgccacttcccaggtagcccagcagcctccagccgctgccgcccctggggaacaggccgtcgcgggccctgccccctcgactgtccccagcagtaccagcaaagaccgcccagtgtcccagcctagccttgtggggagcaaagaggagccgccgccggcgagaagtggcagcggcggcggcagcgccaaggagccacaggaggaacggagccagcagcaggatgatatcgaagagctggagaccaaggccgtgggaatgtctaacgatggccgctttctcaagtttgacatcgaaatcggcagaggctcctttaagacggtctacaaaggtctggacactgaaaccaccgtggaagtcgcctggtgtgaactgcaggatcgaaaattaacaaagtctgagaggcagagatttaaagaagaagctgaaatgttaaaaggtcttcagcatcccaatattgttagattttatgattcctgggaatccacagtaaaaggaaagaagtgcattgttttggtgactgaacttatgacgtctggaacacttaaaacgtatctgaaaaggtttaaagtgatgaagatcaaagttctaagaagctggtgccgtcagatccttaaaggtcttcagtttcttcatactcgaactccacctatcattcaccgcgatcttaaatgtgacaacatctttatcaccggccctactggctcagtcaagattggagacctcggtctggcaaccctgaagcgggcttcttttgccaagagtgtgataggtaccccagagttcatggcccctgagatgtatgaggagaaatatgatgaatccgttgacgtttatgcttttgggatgtgcatgcttgagatggctacatctgaatatccttactcggagtgccaaaatgctgcacagatctaccgtcgcgtgaccagtggggtgaagccagccagttttgacaaagtagcaattcctgaagtgaaggaaattattgaaggatgcatacgacaaaacaaagatgaaagatattccatcaaagaccttttgaaccatgccttcttccaagaggaaacaggagtacgggtagaattagcagaagaagatgatggagaaaaaatagccataaaattatggctacgtattgaagatattaagaaattaaagggaaaatacaaagataatgaagctattgagttttcttttgatttagagagagatgtcccagaagatgttgcacaagaaatggtagagtctgggtatgtctgtgaaggtgatcacaagaccatggctaaagctatcaaagacagagtatcattaattaagaggaaacgagagcagcggcagttggtacgggaggagcaagaaaaaaaaaagcaggaagagagcagtctcaaacagcaggtagaacaatccagtgcttcccagacaggaatcaagcagctcccttctgctagcaccggcatacctactgcttctaccacttcagcttcagtttctacacaagtagaacctgaagaacctgaggcagatcaacatcaacaactacagtaccagcaacccagtatatctgtgttatctgatgggacggttgacagtggtcagggatcctctgtcttcacagaatctcgagtgagcagccaacagacagtttcatatggttcccaacatgaacaggcacattctacaggcacagtcccagggcatataccttctactgtccaagcacagtctcagccccatggggtatatccaccctcaagtgtggcacaggggcagagccagggtcagccatcctcaagtagcttaacaggggtttcatcttcccaacccatacaacatcctcagcagcagcagggaatacagcagacagcccctcctcaacagacagtgcagtattcactttcacagacatcaacctccagtgaggccactactgcacagccagtgagtcagcctcaagctccacaagtcttgcctcaagtatcagctggaaaacagggcttcccacctcgactgccaccacagtacccaggagattcaaatattgctccctcttccaacgtggcttctgtttgcatccattctacagtcctawcccctcccatgccgacagaagtactggctacacctgggtactttcccacagtggtgcagccttatgtggaatcaaatcttttagttcctatgggtggtgtaggaggacaggttcaagtgtcccagccaggagggagtttagcacaagcccccactacatcctcccagcaagcagttttggagagtactcagggagtctctcaggttgctcctgcagagccagttgcagtagcacagccccaagctacccagccgaccactttggcttcctctgtagacagtgcacattcagatgttgcttcaggtatgagtgatggcaatgagaacgtcccatcttccagtggaaggcatgaaggaagaactacaaaacggcattaccgaaaatctgtaaggagtcgctctcgacatgaaaaaacttcacgcccaaaattaagaattttgaatgtttcaaataaaggagaccgagtagtagaatgtcaattagagactcataataggaaaatggttacattcaaatttgacctagatggtgacaaccccgaggagatagcaacaattatggtgaacaatgactttattctagcaatagagagagagtcgtttgtggatcaagtgcgagaaattattgaaaaagctgatgaaatgctcagtgaggatgtcagtgtggaaccagagggtgatcagggattggagagtctacaaggaaaggatgactatggcttttcaggttctcagaaattggaaggagagttcaaacaaccaattcctgcgtcttccatgccacagcaaataggcattcctaccagttctttaactcaagttgttcattctgcgggaaggcggtttatagtgagtcctgtgccagaaagccgattacgagaatcaaaagttttccccagtgaaataacagatacagttgctgcctctacagctcagagccctggaatgaacttgtctcactctgcatcatcccttagtctacaacaggccttttctgaacttagacgtgcccaaatgacagaaggacccaayacagcacctccaaactttagtcatacaggaccaacatttccagtagtacctcctttcttaagtagcattgctggagtcccaaccacagcagcagccacagcaccagtccctgcaacaagcagccctcctaatgacatttccacatcagtaattcagtctgaggttacagtgcccactgaagaggggattgctggagttgccaccagcacaggtgtggtaacttcaggtggtctccccataccacctgtgtctgaatcaccagtactttccagcgtagtttcaagtatcacaatacctgcagttgtctcaatatctactacatccccgtcacttcaagtccccacatccacatctgagatcgttgtttctagtacagcactgtatccttcagtaacagtttcagcaacttcagcctctgcagggggcagtactgctaccccaggtcctaagcctccagctgtagtatctcagcaggcagcaggcagcactactgtgggagccacattaacatcagtttctaccaccacttcattcccaagcacagcttcacagctgtccattcagcttagcagcagtacttctactcctactttagctgaaaccgtggtagttagcgcacactcactagataagacatctcatagcagtacaactggattggctttctccctctctgcaccatcttcctcttcctctcctggagcaggagtgtctagttatatttctcagcctggtgggctgcatcctttggtcattccatcagtgatagcttctactcctattcttccccaagcagcaggacctacttctacacctttattaccccaagtacctagtatcccacccttggtacagcctgttgccaatgtgcctgctgtacagcagacactaattcatagtcagcctcaaccagctttgcttcccaaccagccccatactcattgtcctgaagtagattctgatacacaacccaaagctcctggaattgatgacataaagactctagaagaaaagctgcggtctctgttcagtgaacacagctcatctggagctcagcatgcctctgtctcactggagacctcactagtcatagagagcactgtcacaccaggcatcccaactactgctgttgcaccaagcaaactcctgacttctaccacaagtacttgcttaccaccaaccaatttaccactaggaacagttgctttgccagttacaccagtggtcacacctgggcaagtttctaccccagtcagcactactacatcaggagtgaaacctggaactgctccctccaagccacctctaactaaggctccggtgctgccagtgggtactgaacttccagcaggtactctacccagcgagcagctgccaccttttccaggaccttctctaacccagtcccagcaacctctagaggatcttgatgctcaattgagaagaacacttagtccagagatkatcacagtgacttctgcggttggtcctgtgtccatggcggctccaacagcaatcacagaagcaggaacacagcctcagaagggtgtttctcaagtcaaagaaggccctgtcctagcaactagttcaggagctggtgtttttaagatgggacgatttcaggtttctgttgcagcagacggtgcccagaaagagggtaaaaataagtcagaagatgcaaagtctgttcattttgaatccagcacctcagagtcctcagtgctatcaagtagtagtccagagagtaccttggtgaaaccagagccgaatggcataaccatccctggtatctcttcagatgtgccagagagtgcccacaaaactactgcctcagaggcaaagtcagacactgggcagcctaccaaggttggacgttttcaggtgacaactacagcaaacaaagtgggtcgtttctctgtatcaaaaactgaggacaagatcactgacacaaagaaagaaggaccagtggcatctcctccttttatggatttggaacaagctgttcttcctgctgtgataccaaagaaagagaagcctgaactgtcagagccttcacatctaaatgggccgtcttctgacccggaggccgcttttttaagtagggatgtggatgatggttccggtagtccacactcgccccatcagctgagctcaaagagccttcctagccagaatctaagtcaaagccttagtaattcatttaactcctcttacatgagtagcgacaatgagtcagatatcgaagatgaagacttaaagttagagctgcgacgactacgagataaacatctcaaagagattcaggacctgcagagtcgccagaagcatgaaattgaatctttgtataccaaactgggcaaggtgccccctgctgttattattcccccagctgctcccctttcagggagaagacgacgacccactaaaagcaaaggcagcaaatctagtcgaagcagttccttggggaataaaagcccccagctttcaggtaacctgtctggtcagagtgcagcttcagtcttgcacccccagcagaccctccaccctcctggcaacatcccagagtccgggcagaatcagctgttacagccccttaagccatctccctccagtgacaacctctattcagccttcaccagtgatggtgccatttcagtaccaagcctttctgctccaggtcaaggaaccagcagcacaaacactgttggggcaacagtgaacagccaagccgcccaagctcagcctcctgccatgacgtccagcaggaagggcacattcacagatgacttgcacaagttggtagacaattgggcccgagatgccatgaatctctcaggcaggagaggaagcaaagggcacatgaattatgagggccctggaatggcaaggaagttctctgcacctgggcaactgtgcatctccatgacctcgaacctgggtggctctgcccccatctctgcagcatcagctacctctctaggtcacttcaccaagtctatgtgccccccacagcagtatggctttccagctaccccatttggcgctcaatggagtgggacgggtggcccagcaccacagccacttggccagttccaacctgtgggaactgcctccttgcagaatttcaacatcagcaatttgcagaaatccatcagcaaccccccaggctccaacctgcggaccacttag

SEQ ID NO: 98 - protein, 2229 aa, Homo Sapiens
  VARIANT 824, 1655: Xaa = Any Amino Acid
MSGGAAEKQSSTPGSLFLSPPAPAPKNGSSSDSSVGEKLGAAAADAVTGRTEEYRRRRHTMDKDSRGAAATTTTTEHRFFRRSVICDSNATALELPGLPLSLPQPSIPAAVPQSAPPEPHREETVTATATSQVAQQPPAAAAPGEQAVAGPAPSTVPSSTSKDRPVSQPSLVGSKEEPPPARSGSGGGSAKEPQEERSQQQDDIEELETKAVGMSNDGRFLKFDIEIGRGSFKTVYKGLDTETTVEVAWCELQDRKLTKSERQRFKEEAEMLKGLQHPNIVRFYDSWESTVKGKKCIVLVTELMTSGTLKTYLKRFKVMKIKVLRSWCRQILKGLQFLHTRTPPIIHRDLKCDNIFITGPTGSVKIGDLGLATLKRASFAKSVIGTPEFMAPEMYEEKYDESVDVYAFGMCMLEMATSEYPYSECQNAAQIYRRVTSGVKPASFDKVAIPEVKEIIEGCIRQNKDERYSIKDLLNHAFFQEETGVRVELAEEDDGEKIAIKLWLRIEDIKKLKGKYKDNEAIEFSFDLERDVPEDVAQEMVESGYVCEGDHKTMAKAIKDRVSLIKRKREQRQLVREEQEKKKQEESSLKQQVEQSSASQTGIKQLPSASTGIPTASTTSASVSTQVEPEEPEADQHQQLQYQQPSISVLSDGTVDSGQGSSVFTESRVSSQQTVSYGSQHEQAHSTGTVPGHIPSTVQAQSQPHGVYPPSSVAQGQSQGQPSSSSLTGVSSSQPIQHPQQQQGIQQTAPPQQTVQYSLSQTSTSSEATTAQPVSQPQAPQVLPQVSAGKQGFPPRLPPQYPGDSNIAPSSNVASVCIHSTVLXPPMPTEVLATPGYFPTVVQPYVESNLLVPMGGVGGQVQVSQPGGSLAQAPTTSSQQAVLESTQGVSQVAPAEPVAVAQPQATQPTTLASSVDSAHSDVASGMSDGNENVPSSSGRHEGRTTKRHYRKSVRSRSRHEKTSRPKLRILNVSNKGDRVVECQLETHNRKMVTFKFDLDGDNPEEIATIMVNNDFILAIERESFVDQVREIIEKADEMLSEDVSVEPEGDQGLESLQGKDDYGFSGSQKLEGEFKQPIPASSMPQQIGIPTSSLTQVVHSAGRRFIVSPVPESRLRESKVFPSEITDTVAASTAQSPGMNLSHSASSLSLQQAFSELRRAQMTEGPNTAPPNFSHTGPTFPVVPPFLSSIAGVPTTAAATAPVPATSSPPNDISTSVIQSEVTVPTEEGIAGVATSTGVVTSGGLPIPPVSESPVLSSVVSSITIPAVVSISTTSPSLQVPTSTSEIVVSSTALYPSVTVSATSASAGGSTATPGPKPPAVVSQQAAGSTTVGATLTSVSTTTSFPSTASQLSIQLSSSTSTPTLAETVVVSAHSLDKTSHSSTTGLAFSLSAPSSSSSPGAGVSSYISQPGGLHPLVIPSVIASTPILPQAAGPTSTPLLPQVPSIPPLVQPVANVPAVQQTLIHSQPQPALLPNQPHTHCPEVDSDTQPKAPGIDDIKTLEEKLRSLFSEHSSSGAQHASVSLETSLVIESTVTPGIPTTAVAPSKLLTSTTSTCLPPTNLPLGTVALPVTPVVTPGQVSTPVSTTTSGVKPGTAPSKPPLTKAPVLPVGTELPAGTLPSEQLPPFPGPSLTQSQQPLEDLDAQLRRTLSPEXITVTSAVGPVSMAAPTAITEAGTQPQKGVSQVKEGPVLATSSGAGVFKMGRFQVSVAADGAQKEGKNKSEDAKSVHFESSTSESSVLSSSSPESTLVKPEPNGITIPGISSDVPESAHKTTASEAKSDTGQPTKVGRFQVTTTANKVGRFSVSKTEDKITDTKKEGPVASPPFMDLEQAVLPAVIPKKEKPELSEPSHLNGPSSDPEAAFLSRDVDDGSGSPHSPHQLSSKSLPSQNLSQSLSNSFNSSYMSSDNESDIEDEDLKLELRRLRDKHLKEIQDLQSRQKHEIESLYTKLGKVPPAVIIPPAAPLSGRRRRPTKSKGSKSSRSSSLGNKSPQLSGNLSGQSAASVLHPQQTLHPPGNIPESGQNQLLQPLKPSPSSDNLYSAFTSDGAISVPSLSAPGQGTSSTNTVGATVNSQAAQAQPPAMTSSRKGTFTDDLHKLVDNWARDAMNLSGRRGSKGHMNYEGPGMARKFSAPGQLCISMTSNLGGSAPISAASATSLGHFTKSMCPPQQYGFPATPFGAQWSGTGGPAPQPLGQFQPVGTASLQNFNISNLQKSISNPPGSNLRTT

SEQ ID NO: 99 - DNA, 6279 bp, Homo Sapiens
  CDS (1)...(6279)
atgtctggcggcgccgcagagaagcagagcagcactcccggttccctgttcctctcgccgccggctcctgcccccaagaatggctccagctccgattcctccgtgggggagaaactgggagccgcggccgccgacgctgtgaccggcaggaccgaggagtacaggcgccgccgccacactatggacaaggacagccgtggggcggccgcgaccactaccaccactgagcaccgcttcttccgccggagcgtcatctgcgactccaatgccactgcactggagcttcccggccttcctctttccctgccccagcccagcatccccgcggctgtcccgcagagtgctccaccggagccccaccgggaagagaccgtgaccgccaccgccacttcccaggtagcccagcagcctccagccgctgccgcccctggggaacaggccgtcgcgggccctgccccctcgactgtccccagcagtaccagcaaagaccgcccagtgtcccagcctagccttgtggggagcaaagaggagccgccgccggcgagaagtggcagcggcggcggcagcgccaaggagccacaggaggaacggagccagcagcaggatgatatcgaagagctggagaccaaggccgtgggaatgtctaacgatggccgctttctcaagtttgacatcgaaatcggcagaggctcctttaagacggtctacaaaggtctggacactgaaaccaccgtggaagtcgcctggtgtgaactgcaggatcgaaaattaacaaagtctgagaggcagagatttaaagaagaagctgaaatgttaaaaggtcttcagcatcccaatattgttagattttatgattcctgggaatccacagtaaaaggaaagaagtgcattgttttggtgactgaacttatgacgtctggaacacttaaaacgtatctgaaaaggtttaaagtgatgaagatcaaagttctaagaagctggtgccgtcagatccttaaaggtcttcagtttcttcatactcgaactccacctatcattcaccgcgatcttaaatgtgacaacatctttatcaccggccctactggctcagtcaagattggagacctcggtctggcaaccctgaagcgggcttcttttgccaagagtgtgataggtaccccagagttcatggcccctgagatgtatgaggagaaatatgatgaatccgttgacgtttatgcttttgggatgtgcatgcttgagatggctacatctgaatatccttactcggagtgccaaaatgctgcacagatctaccgtcgcgtgaccagtggggtgaagccagccagttttgacaaagtagcaattcctgaagtgaaggaaattattgaaggatgcatacgacaaaacaaagatgaaagatattccatcaaagaccttttgaaccatgccttcttccaagaggaaacaggagtacgggtagaattagcagaagaagatgatggagaaaaaatagccataaaattatggctacgtattgaagatattaagaaattaaagggaaaatacaaagataatgaagctattgagttttcttttgatttagagagagatgtcccagaagatgttgcacaagaaatggtagagtctgggtatgtctgtgaaggtgatcacaagaccatggctaaagctatcaaagacagagtatcattaattaagaggaaacgagagcagcggcagttggtacgggaggagcaagaaaaaaaaaagcaggaagagagcagtctcaaacagcaggtagaacaatccagtgcttcccagacaggaatcaagcagctcccttctgctagcaccggcatacctactgcttctaccacttcagcttcagtttctacacaagtagaacctgaagaacctgaggcagatcaacatcaacaactacagtaccagcaacccagtatatctgtgttatctgatgggacggttgacagtggtcagggatcctctgtcttcacagaatctcgagtgagcagccaacagacagtttcatatggttcccaacatgaacaggcacattctacaggcacagtcccagggcatataccttctactgtccaagcacagtctcagccccatggggtatatccaccctcaagtgtggcacaggggcagagccagggtcagccatcctcaagtagcttaacaggggtttcatcttcccaacccatacaacatcctcagcagcagcagggaatacagcagacagcccctcctcaacagacagtgcagtattcactttcacagacatcaacctccagtgaggccactactgcacagccagtgagtcagcctcaagctccacaagtcttgcctcaagtatcagctggaaaacagggcttcccacctcgactgccaccacagtacccaggagattcaaatattgctccctcttccaacgtggcttctgtttgcatccattctacagtcctawcccctcccatgccgacagaagtactggctacacctgggtactttcccacagtggtgcagccttatgtggaatcaaatcttttagttcctatgggtggtgtaggaggacaggttcaagtgtcccagccaggagggagtttagcacaagcccccactacatcctcccagcaagcagttttggagagtactcagggagtctctcaggttgctcctgcagagccagttgcagtagcacagccccaagctacccagccgaccactttggcttcctctgtagacagtgcacattcagatgttgcttcaggtatgagtgatggcaatgagaacgtcccatcttccagtggaaggcatgaaggaagaactacaaaacggcattaccgaaaatctgtaaggagtcgctctcgacatgaaaaaacttcacgcccaaaattaagaattttgaatgtttcaaataaaggagaccgagtagtagaatgtcaattagagactcataataggaaaatggttacattcaaatttgacctagatggtgacaaccccgaggagatagcaacaattatggtgaacaatgactttattctagcaatagagagagagtcgtttgtggatcaagtgcgagaaattattgaaaaagctgatgaaatgctcagtgaggatgtcagtgtggaaccagagggtgatcagggattggagagtctacaaggaaaggatgactatggcttttcaggttctcagaaattggaaggagagttcaaacaaccaattcctgcgtcttccatgccacagcaaataggcattcctaccagttctttaactcaagttgttcattctgcgggaaggcggtttatagtgagtcctgtgccagaaagccgattacgagaatcaaaagttttccccagtgaaataacagatacagttgctgcctctacagctcagagccctggaatgaacttgtctcactctgcatcatcccttagtctacaacaggccttttctgaacttagacgtgcccaaatgacagaaggacccaayacagcacctccaaactttagtcatacaggaccaacatttccagtagtacctcctttcttaagtagcattgctggagtcccaaccacagcagcagccacagcaccagtccctgcaacaagcagccctcctaatgacatttccacatcagtaattcagtctgaggttacagtgcccactgaagaggggattgctggagttgccaccagcacaggtgtggtaacttcaggtggtctccccataccacctgtgtctgaatcaccagtactttccagcgtagtttcaagtatcacaatacctgcagttgtctcaatatctactacatccccgtcacttcaagtccccacatccacatctgagatcgttgtttctagtacagcactgtatccttcagtaacagtttcagcaacttcagcctctgcagggggcagtactgctaccccaggtcctaagcctccagctgtagtatctcagcaggcagcaggcagcactactgtgggagccacattaacatcagtttctaccaccacttcattcccaagcacagcttcacagctgtccattcagcttagcagcagtacttctactcctactttagctgaaaccgtggtagttagcgcacactcactagataagacatctcatagcagtacaactggattggctttctccctctctgcaccatcttcctcttcctctcctggagcaggagtgtctagttatatttctcagcctggtgggctgcatcctttggtcattccatcagtgatagcttctactcctattcttccccaagcagcaggacctacttctacacctttattaccccaagtacctagtatcccacccttggtacagcctgttgccaatgtgcctgctgtacagcagacactaattcatagtcagcctcaaccagctttgcttcccaaccagccccatactcattgtcctgaagtagattctgatacacaacccaaagctcctggaattgatgacataaagactctagaagaaaagctgcggtctctgttcagtgaacacagctcatctggagctcagcatgcctctgtctcactggagacctcactagtcatagagagcactgtcacaccaggcatcccaactactgctgttgcaccaagcaaactcctgacttctaccacaagtacttgcttaccaccaaccaatttaccactaggaacagttgctttgccagttacaccagtggtcacacctgggcaagtttctaccccagtcagcactactacatcaggagtgaaacctggaactgctccctccaagccacctctaactaaggctccggtgctgccagtgggtactgaacttccagcaggtactctacccagcgagcagctgccaccttttccaggaccttctctaacccagtcccagcaacctctagaggatcttgatgctcaattgagaagaacacttagtccagagatkatcacagtgacttctgcggttggtcctgtgtccatggcggctccaacagcaatcacagaagcaggaacacagcctcagaagggtgtttctcaagtcaaagaaggccctgtcctagcaactagttcaggagctggtgtttttaagatgggacgatttcaggtttctgttgcagcagacggtgcccagaaagagggtaaaaataagtcagaagatgcaaagtctgttcattttgaatccagcacctcagagtcctcagtgctatcaagtagtagtccagagagtaccttggtgaaaccagagccgaatggcataaccatccctggtatctcttcagatgtgccagagagtgcccacaaaactactgcctcagaggcaaagtcagacactgggcagcctaccaaggttggacgttttcaggtgacaactacagcaaacaaagtgggtcgtttctctgtatcaaaaactgaggacaagatcactgacacaaagaaagaaggaccagtggcatctcctccttttatggatttggaacaagctgttcttcctgctgtgataccaaagaaagagaagcctgaactgtcagagccttcacatctaaatgggccgtcttctgacccggaggccgcttttttaagtagggatgtggatgatggttccggtagtccacactcgccccatcagctgagctcaaagagccttcctagccagaatctaagtcaaagccttagtaattcatttaactcctcttacatgagtagcgacaatgagtcagatatcgaagatgaagacttaaagttagagctgcgacgactacgagataaacatctcaaagagattcaggacctgcagagtcgccagaagcatgaaattgaatctttgtataccaaactgggcaaggtgccccctgctgttattattcccccagctgctcccctttcagggagaagacgacgacccactaaaagcaaaggcagcaaatctagtcgaagcagttccttggggaataaaagcccccagctttcaggtaacctgtctggtcagagtgcagcttcagtcttgcacccccagcagaccctccaccctcctggcaacatcccagagtccgggcagaatcagctgttacagccccttaagccatctccctccagtgacaacctctattcagccttcaccagtgatggtgccatttcagtaccaagcctttctgctccaggtcaaggaataaagcaaccatcatcgtccaaaaacaataaaatggagatgttgccatacctgggacaaaagcctgttaaggcgggttgggagactagctga

SEQ ID NO: 100 - protein, 2092 aa, Homo Sapiens
  VARIANT 824, 1655: Xaa = Any Amino Acid
MSGGAAEKQSSTPGSLFLSPPAPAPKNGSSSDSSVGEKLGAAAADAVTGRTEEYRRRRHTMDKDSRGAAATTTTTEHRFFRRSVICDSNATALELPGLPLSLPQPSIPAAVPQSAPPEPHREETVTATATSQVAQQPPAAAAPGEQAVAGPAPSTVPSSTSKDRPVSQPSLVGSKEEPPPARSGSGGGSAKEPQEERSQQQDDIEELETKAVGMSNDGRFLKFDIEIGRGSFKTVYKGLDTETTVEVAWCELQDRKLTKSERQRFKEEAEMLKGLQHPNIVRFYDSWESTVKGKKCIVLVTELMTSGTLKTYLKRFKVMKIKVLRSWCRQILKGLQFLHTRTPPIIHRDLKCDNIFITGPTGSVKIGDLGLATLKRASFAKSVIGTPEFMAPEMYEEKYDESVDVYAFGMCMLEMATSEYPYSECQNAAQIYRRVTSGVKPASFDKVAIPEVKEIIEGCIRQNKDERYSIKDLLNHAFFQEETGVRVELAEEDDGEKIAIKLWLRIEDIKKLKGKYKDNEAIEFSFDLERDVPEDVAQEMVESGYVCEGDHKTMAKAIKDRVSLIKRKREQRQLVREEQEKKKQEESSLKQQVEQSSASQTGIKQLPSASTGIPTASTTSASVSTQVEPEEPEADQHQQLQYQQPSISVLSDGTVDSGQGSSVFTESRVSSQQTVSYGSQHEQAHSTGTVPGHIPSTVQAQSQPHGVYPPSSVAQGQSQGQPSSSSLTGVSSSQPIQHPQQQQGIQQTAPPQQTVQYSLSQTSTSSEATTAQPVSQPQAPQVLPQVSAGKQGFPPRLPPQYPGDSNIAPSSNVASVCIHSTVLXPPMPTEVLATPGYFPTVVQPYVESNLLVPMGGVGGQVQVSQPGGSLAQAPTTSSQQAVLESTQGVSQVAPAEPVAVAQPQATQPTTLASSVDSAHSDVASGMSDGNENVPSSSGRHEGRTTKRHYRKSVRSRSRHEKTSRPKLRILNVSNKGDRVVECQLETHNRKMVTFKFDLDGDNPEEIATIMVNNDFILAIERESFVDQVREIIEKADEMLSEDVSVEPEGDQGLESLQGKDDYGFSGSQKLEGEFKQPIPASSMPQQIGIPTSSLTQVVHSAGRRFIVSPVPESRLRESKVFPSEITDTVAASTAQSPGMNLSHSASSLSLQQAFSELRRAQMTEGPNTAPPNFSHTGPTFPVVPPFLSSIAGVPTTAAATAPVPATSSPPNDISTSVIQSEVTVPTEEGIAGVATSTGVVTSGGLPIPPVSESPVLSSVVSSITIPAVVSISTTSPSLQVPTSTSEIVVSSTALYPSVTVSATSASAGGSTATPGPKPPAVVSQQAAGSTTVGATLTSVSTTTSFPSTASQLSIQLSSSTSTPTLAETVVVSAHSLDKTSHSSTTGLAFSLSAPSSSSSPGAGVSSYISQPGGLHPLVIPSVIASTPILPQAAGPTSTPLLPQVPSIPPLVQPVANVPAVQQTLIHSQPQPALLPNQPHTHCPEVDSDTQPKAPGIDDIKTLEEKLRSLFSEHSSSGAQHASVSLETSLVIESTVTPGIPTTAVAPSKLLTSTTSTCLPPTNLPLGTVALPVTPVVTPGQVSTPVSTTTSGVKPGTAPSKPPLTKAPVLPVGTELPAGTLPSEQLPPFPGPSLTQSQQPLEDLDAQLRRTLSPEXITVTSAVGPVSMAAPTAITEAGTQPQKGVSQVKEGPVLATSSGAGVFKMGRFQVSVAADGAQKEGKNKSEDAKSVHFESSTSESSVLSSSSPESTLVKPEPNGITIPGISSDVPESAHKTTASEAKSDTGQPTKVGRFQVTTTANKVGRFSVSKTEDKITDTKKEGPVASPPFMDLEQAVLPAVIPKKEKPELSEPSHLNGPSSDPEAAFLSRDVDDGSGSPHSPHQLSSKSLPSQNLSQSLSNSFNSSYMSSDNESDIEDEDLKLELRRLRDKHLKEIQDLQSRQKHEIESLYTKLGKVPPAVIIPPAAPLSGRRRRPTKSKGSKSSRSSSLGNKSPQLSGNLSGQSAASVLHPQQTLHPPGNIPESGQNQLLQPLKPSPSSDNLYSAFTSDGAISVPSLSAPGQGIKQPSSSKNNKMEMLPYLGQKPVKAGWETS

SEQ ID NO: 101 - DNA, 2490 bp, Homo Sapiens
  CDS (1)...(2490)
atgtctggcggcgccgcagagaagcagagcagcactcccggttccctgttcctctcgccgccggctcctgcccccaagaatggctccagctccgattcctccgtgggggagaaactgggagccgcggccgccgacgctgtgaccggcaggaccgaggagtacaggcgccgccgccacactatggacaaggacagccgtggggcggccgcgaccactaccaccactgagcaccgcttcttccgccggagcgtcatctgcgactccaatgccactgcactggagcttcccggccttcctctttccctgccccagcccagcatccccgcggctgtcccgcagagtgctccaccggagccccaccgggaagagaccgtgaccgccaccgccacttcccaggtagcccagcagcctccagccgctgccgcccctggggaacaggccgtcgcgggccctgccccctcgactgtccccagcagtaccagcaaagaccgcccagtgtcccagcctagccttgtggggagcaaagaggagccgccgccggcgagaagtggcagcggcggcggcagcgccaaggagccacaggaggaacggagccagcagcaggatgatatcgaagagctggagaccaaggccgtgggaatgtctaacgatggccgctttctcaagtttgacatcgaaatcggcagaggctcctttaagacggtctacaaaggtctggacactgaaaccaccgtggaagtcgcctggtgtgaactgcaggatcgaaaattaacaaagtctgagaggcagagatttaaagaagaagctgaaatgttaaaaggtcttcagcatcccaatattgttagattttatgattcctgggaatccacagtaaaaggaaagaagtgcattgttttggtgactgaacttatgacgtctggaacacttaaaacgtatctgaaaaggtttaaagtgatgaagatcaaagttctaagaagctggtgccgtcagatccttaaaggtcttcagtttcttcatactcgaactccacctatcattcaccgcgatcttaaatgtgacaacatctttatcaccggccctactggctcagtcaagattggagacctcggtctggcaaccctgaagcgggcttcttttgccaagagtgtgataggtaccccagagttcatggcccctgagatgtatgaggagaaatatgatgaatccgttgacgtttatgcttttgggatgtgcatgcttgagatggctacatctgaatatccttactcggagtgccaaaatgctgcacagatctaccgtcgcgtgaccagtggggtgaagccagccagttttgacaaagtagcaattcctgaagtgaaggaaattattgaaggatgcatacgacaaaacaaagatgaaagatattccatcaaagaccttttgaaccatgccttcttccaagaggaaacaggagtacgggtagaattagcagaagaagatgatggagaaaaaatagccataaaattatggctacgtattgaagatattaagaaattaaagggaaaatacaaagataatgaagctattgagttttcttttgatttagagagagatgtcccagaagatgttgcacaagaaatggtagagtctgggtatgtctgtgaaggtgatcacaagaccatggctaaagctatcaaagacagagtatcattaattaagaggaaacgagagcagcggcagttggtacgggaggagcaagaaaaaaaaaagcaggaagagagcagtctcaaacagcaggtagaacaatccagtgcttcccagacaggaatcaagcagctcccttctgctagcaccggcatacctactgcttctaccacttcagcttcagtttctacacaagtagaacctgaagaacctgaggcagatcaacatcaacaactacagtaccagcaacccagtatatctgtgttatctgatgggacggttgacagtggtcagggatcctctgtcttcacagaatctcgagtgagcagccaacagacagtttcatatggttcccaacatgaacaggcacattctacaggcacagtcccagggcatataccttctactgtccaagcacagtctcagccccatggggtatatccaccctcaagtgtggcacaggggcagagccagggtcagccatcctcaagtagcttaacaggggtttcatcttcccaacccatacaacatcctcagcagcagcagggaatacagcagacagcccctcctcaacagacagtgcagtattcactttcacagacatcaacctccagtgaggccactactgcacagccagtgagtcagcctcaagctccacaagtcttgcctcaagtatcagctggaaaacagggcttcccacctcgactgccaccacagtacccaggagattcaaatattgctccctcttccaacgtggcttctgtttgcatccattctacagtcctawcccctataccttctgcataa

SEQ ID NO: 102 - protein, 829 aa, Homo Sapiens
  VARIANT 824: Xaa = Any Amino Acid
MSGGAAEKQSSTPGSLFLSPPAPAPKNGSSSDSSVGEKLGAAAADAVTGRTEEYRRRRHTMDKDSRGAAATTTTTEHRFFRRSVICDSNATALELPGLPLSLPQPSIPAAVPQSAPPEPHREETVTATATSQVAQQPPAAAAPGEQAVAGPAPSTVPSSTSKDRPVSQPSLVGSKEEPPPARSGSGGGSAKEPQEERSQQQDDIEELETKAVGMSNDGRFLKFDIEIGRGSFKTVYKGLDTETTVEVAWCELQDRKLTKSERQRFKEEAEMLKGLQHPNIVRFYDSWESTVKGKKCIVLVTELMTSGTLKTYLKRFKVMKIKVLRSWCRQILKGLQFLHTRTPPIIHRDLKCDNIFITGPTGSVKIGDLGLATLKRASFAKSVIGTPEFMAPEMYEEKYDESVDVYAFGMCMLEMATSEYPYSECQNAAQIYRRVTSGVKPASFDKVAIPEVKEIIEGCIRQNKDERYSIKDLLNHAFFQEETGVRVELAEEDDGEKIAIKLWLRIEDIKKLKGKYKDNEAIEFSFDLERDVPEDVAQEMVESGYVCEGDHKTMAKAIKDRVSLIKRKREQRQLVREEQEKKKQEESSLKQQVEQSSASQTGIKQLPSASTGIPTASTTSASVSTQVEPEEPEADQHQQLQYQQPSISVLSDGTVDSGQGSSVFTESRVSSQQTVSYGSQHEQAHSTGTVPGHIPSTVQAQSQPHGVYPPSSVAQGQSQGQPSSSSLTGVSSSQPIQHPQQQQGIQQTAPPQQTVQYSLSQTSTSSEATTAQPVSQPQAPQVLPQVSAGKQGFPPRLPPQYPGDSNIAPSSNVASVCIHSTVLXPIPSA

SEQ ID NO: 103 - DNA, 6411 bp, Homo Sapiens
  CDS (1)...(6411)
atgtctggcggcgccgcagagaagcagagcagcactcccggttccctgttcctctcgccgccggctcctgcccccaagaatggctccagctccgattcctccgtgggggagaaactgggagccgcggccgccgacgctgtgaccggcaggaccgaggagtacaggcgccgccgccacactatggacaaggacagccgtggggcggccgcgaccactaccaccactgagcaccgcttcttccgccggagcgtcatctgcgactccaatgccactgcactggagcttcccggccttcctctttccctgccccagcccagcatccccgcggctgtcccgcagagtgctccaccggagccccaccgggaagagaccgtgaccgccaccgccacttcccaggtagcccagcagcctccagccgctgccgcccctggggaacaggccgtcgcgggccctgccccctcgactgtccccagcagtaccagcaaagaccgcccagtgtcccagcctagccttgtggggagcaaagaggagccgccgccggcgagaagtggcagcggcggcggcagcgccaaggagccacaggaggaacggagccagcagcaggatgatatcgaagagctggagaccaaggccgtgggaatgtctaacgatggccgctttctcaagtttgacatcgaaatcggcagaggctcctttaagacggtctacaaaggtctggacactgaaaccaccgtggaagtcgcctggtgtgaactgcaggatcgaaaattaacaaagtctgagaggcagagatttaaagaagaagctgaaatgttaaaaggtcttcagcatcccaatattgttagattttatgattcctgggaatccacagtaaaaggaaagaagtgcattgttttggtgactgaacttatgacgtctggaacacttaaaacgtatctgaaaaggtttaaagtgatgaagatcaaagttctaagaagctggtgccgtcagatccttaaaggtcttcagtttcttcatactcgaactccacctatcattcaccgcgatcttaaatgtgacaacatctttatcaccggccctactggctcagtcaagattggagacctcggtctggcaaccctgaagcgggcttcttttgccaagagtgtgataggtaccccagagttcatggcccctgagatgtatgaggagaaatatgatgaatccgttgacgtttatgcttttgggatgtgcatgcttgagatggctacatctgaatatccttactcggagtgccaaaatgctgcacagatctaccgtcgcgtgaccagtggggtgaagccagccagttttgacaaagtagcaattcctgaagtgaaggaaattattgaaggatgcatacgacaaaacaaagatgaaagatattccatcaaagaccttttgaaccatgccttcttccaagaggaaacaggagtacgggtagaattagcagaagaagatgatggagaaaaaatagccataaaattatggctacgtattgaagatattaagaaattaaagggaaaatacaaagataatgaagctattgagttttcttttgatttagagagagatgtcccagaagatgttgcacaagaaatggtagagtctgggtatgtctgtgaaggtgatcacaagaccatggctaaagctatcaaagacagagtatcattaattaagaggaaacgagagcagcggcagttggtacgggaggagcaagaaaaaaaaaagcaggaagagagcagtctcaaacagcaggtagaacaatccagtgcttcccagacaggaatcaagcagctcccttctgctagcaccggcatacctactgcttctaccacttcagcttcagtttctacacaagtagaacctgaagaacctgaggcagatcaacatcaacaactacagtaccagcaacccagtatatctgtgttatctgatgggacggttgacagtggtcagggatcctctgtcttcacagaatctcgagtgagcagccaacagacagtttcatatggttcccaacatgaacaggcacattctacaggcacagtcccagggcatataccttctactgtccaagcacagtctcagccccatggggtatatccaccctcaagtgtggcacaggggcagagccagggtcagccatcctcaagtagcttaacaggggtttcatcttcccaacccatacaacatcctcagcagcagcagggaatacagcagacagcccctcctcaacagacagtgcagtattcactttcacagacatcaacctccagtgaggccactactgcacagccagtgagtcagcctcaagctccacaagtcttgcctcaagtatcagctggaaaacagagtactcagggagtctctcaggttgctcctgcagagccagttgcagtagcacagccccaagctacccagccgaccactttggcttcctctgtagacagtgcacattcagatgttgcttcaggtatgagtgatggcaatgagaacgtcccatcttccagtggaaggcatgaaggaagaactacaaaacggcattaccgaaaatctgtaaggagtcgctctcgacatgaaaaaacttcacgcccaaaattaagaattttgaatgtttcaaataaaggagaccgagtagtagaatgtcaattagagactcataataggaaaatggttacattcaaatttgacctagatggtgacaaccccgaggagatagcaacaattatggtgaacaatgactttattctagcaatagagagagagtcgtttgtggatcaagtgcgagaaattattgaaaaagctgatgaaatgctcagtgaggatgtcagtgtggaaccagagggtgatcagggattggagagtctacaaggaaaggatgactatggcttttcaggttctcagaaattggaaggagagttcaaacaaccaattcctgcgtcttccatgccacagcaaataggcattcctaccagttctttaactcaagttgttcattctgcgggaaggcggtttatagtgagtcctgtgccagaaagccgattacgagaatcaaaagttttccccagtgaaataacagatacagttgctgcctctacagctcagagccctggaatgaacttgtctcactctgcatcatcccttagtctacaacaggccttttctgaacttagacgtgcccaaatgacagaaggacccaayacagcacctccaaactttagtcatacaggaccaacatttccagtagtacctcctttcttaagtagcattgctggagtcccaaccacagcagcagccacagcaccagtccctgcaacaagcagccctcctaatgacatttccacatcagtaattcagtctgaggttacagtgcccactgaagaggggattgctggagttgccaccagcacaggtgtggtaacttcaggtggtctccccataccacctgtgtctgaatcaccagtactttccagcgtagtttcaagtatcacaatacctgcagttgtctcaatatctactacatccccgtcacttcaagtccccacatccacatctgagatcgttgtttctagtacagcactgtatccttcagtaacagtttcagcaacttcagcctctgcagggggcagtactgctaccccaggtcctaagcctccagctgtagtatctcagcaggcagcaggcagcactactgtgggagccacattaacatcagtttctaccaccacttcattcccaagcacagcttcacagctgtccattcagcttagcagcagtacttctactcctactttagctgaaaccgtggtagttagcgcacactcactagataagacatctcatagcagtacaactggattggctttctccctctctgcaccatcttcctcttcctctcctggagcaggagtgtctagttatatttctcagcctggtgggctgcatcctttggtcattccatcagtgatagcttctactcctattcttccccaagcagcaggacctacttctacacctttattaccccaagtacctagtatcccacccttggtacagcctgttgccaatgtgcctgctgtacagcagacactaattcatagtcagcctcaaccagctttgcttcccaaccagccccatactcattgtcctgaagtagattctgatacacaacccaaagctcctggaattgatgacataaagactctagaagaaaagctgcggtctctgttcagtgaacacagctcatctggagctcagcatgcctctgtctcactggagacctcactagtcatagagagcactgtcacaccaggcatcccaactactgctgttgcaccaagcaaactcctgacttctaccacaagtacttgcttaccaccaaccaatttaccactaggaacagttgctttgccagttacaccagtggtcacacctgggcaagtttctaccccagtcagcactactacatcaggagtgaaacctggaactgctccctccaagccacctctaactaaggctccggtgctgccagtgggtactgaacttccagcaggtactctacccagcgagcagctgccaccttttccaggaccttctctaacccagtcccagcaacctctagaggatcttgatgctcaattgagaagaacacttagtccagagatkatcacagtgacttctgcggttggtcctgtgtccatggcggctccaacagcaatcacagaagcaggaacacagcctcagaagggtgtttctcaagtcaaagaaggccctgtcctagcaactagttcaggagctggtgtttttaagatgggacgatttcaggtttctgttgcagcagacggtgcccagaaagagggtaaaaataagtcagaagatgcaaagtctgttcattttgaatccagcacctcagagtcctcagtgctatcaagtagtagtccagagagtaccttggtgaaaccagagccgaatggcataaccatccctggtatctcttcagatgtgccagagagtgcccacaaaactactgcctcagaggcaaagtcagacactgggcagcctaccaaggttggacgttttcaggtgacaactacagcaaacaaagtgggtcgtttctctgtatcaaaaactgaggacaagatcactgacacaaagaaagaaggaccagtggcatctcctccttttatggatttggaacaagctgttcttcctgctgtgataccaaagaaagagaagcctgaactgtcagagccttcacatctaaatgggccgtcttctgacccggaggccgcttttttaagtagggatgtggatgatggttccggtagtccacactcgccccatcagctgagctcaaagagccttcctagccagaatctaagtcaaagccttagtaattcatttaactcctcttacatgagtagcgacaatgagtcagatatcgaagatgaagacttaaagttagagctgcgacgactacgagataaacatctcaaagagattcaggacctgcagagtcgccagaagcatgaaattgaatctttgtataccaaactgggcaaggtgccccctgctgttattattcccccagctgctcccctttcagggagaagacgacgacccactaaaagcaaaggcagcaaatctagtcgaagcagttccttggggaataaaagcccccagctttcaggtaacctgtctggtcagagtgcagcttcagtcttgcacccccagcagaccctccaccctcctggcaacatcccagagtccgggcagaatcagctgttacagccccttaagccatctccctccagtgacaacctctattcagccttcaccagtgatggtgccatttcagtaccaagcctttctgctccaggtcaaggaaccagcagcacaaacactgttggggcaacagtgaacagccaagccgcccaagctcagcctcctgccatgacgtccagcaggaagggcacattcacagatgacttgcacaagttggtagacaattgggcccgagatgccatgaatctctcaggcaggagaggaagcaaagggcacatgaattatgagggccctggaatggcaaggaagttctctgcacctgggcaactgtgcatctccatgacctcgaacctgggtggctctgcccccatctctgcagcatcagctacctctctaggtcacttcaccaagtctatgtgccccccacagcagtatggctttccagctaccccatttggcgctcaatggagtgggacgggtggcccagcaccacagccacttggccagttccaacctgtgggaactgcctccttgcagaatttcaacatcagcaatttgcagaaatccatcagcaaccccccaggctccaacctgcggaccacttag

SEQ ID NO: 104 - protein, 2136 aa, Homo Sapiens
  VARIANT 1562: Xaa = Any Amino Acid
MSGGAAEKQSSTPGSLFLSPPAPAPKNGSSSDSSVGEKLGAAAADAVTGRTEEYRRRRHTMDKDSRGAAATTTTTEHRFFRRSVICDSNATALELPGLPLSLPQPSIPAAVPQSAPPEPHREETVTATATSQVAQQPPAAAAPGEQAVAGPAPSTVPSSTSKDRPVSQPSLVGSKEEPPPARSGSGGGSAKEPQEERSQQQDDIEELETKAVGMSNDGRFLKFDIEIGRGSFKTVYKGLDTETTVEVAWCELQDRKLTKSERQRFKEEAEMLKGLQHPNIVRFYDSWESTVKGKKCIVLVTELMTSGTLKTYLKRFKVMKIKVLRSWCRQILKGLQFLHTRTPPIIHRDLKCDNIFITGPTGSVKIGDLGLATLKRASFAKSVIGTPEFMAPEMYEEKYDESVDVYAFGMCMLEMATSEYPYSECQNAAQIYRRVTSGVKPASFDKVAIPEVKEIIEGCIRQNKDERYSIKDLLNHAFFQEETGVRVELAEEDDGEKIAIKLWLRIEDIKKLKGKYKDNEAIEFSFDLERDVPEDVAQEMVESGYVCEGDHKTMAKAIKDRVSLIKRKREQRQLVREEQEKKKQEESSLKQQVEQSSASQTGIKQLPSASTGIPTASTTSASVSTQVEPEEPEADQHQQLQYQQPSISVLSDGTVDSGQGSSVFTESRVSSQQTVSYGSQHEQAHSTGTVPGHIPSTVQAQSQPHGVYPPSSVAQGQSQGQPSSSSLTGVSSSQPIQHPQQQQGIQQTAPPQQTVQYSLSQTSTSSEATTAQPVSQPQAPQVLPQVSAGKQSTQGVSQVAPAEPVAVAQPQATQPTTLASSVDSAHSDVASGMSDGNENVPSSSGRHEGRTTKRHYRKSVRSRSRHEKTSRPKLRILNVSNKGDRVVECQLETHNRKMVTFKFDLDGDNPEEIATIMVNNDFILAIERESFVDQVREIIEKADEMLSEDVSVEPEGDQGLESLQGKDDYGFSGSQKLEGEFKQPIPASSMPQQIGIPTSSLTQVVHSAGRRFIVSPVPESRLRESKVFPSEITDTVAASTAQSPGMNLSHSASSLSLQQAFSELRRAQMTEGPNTAPPNFSHTGPTFPVVPPFLSSIAGVPTTAAATAPVPATSSPPNDISTSVIQSEVTVPTEEGIAGVATSTGVVTSGGLPIPPVSESPVLSSVVSSITIPAVVSISTTSPSLQVPTSTSEIVVSSTALYPSVTVSATSASAGGSTATPGPKPPAVVSQQAAGSTTVGATLTSVSTTTSFPSTASQLSIQLSSSTSTPTLAETVVVSAHSLDKTSHSSTTGLAFSLSAPSSSSSPGAGVSSYISQPGGLHPLVIPSVIASTPILPQAAGPTSTPLLPQVPSIPPLVQPVANVPAVQQTLIHSQPQPALLPNQPHTHCPEVDSDTQPKAPGIDDIKTLEEKLRSLFSEHSSSGAQHASVSLETSLVIESTVTPGIPTTAVAPSKLLTSTTSTCLPPTNLPLGTVALPVTPVVTPGQVSTPVSTTTSGVKPGTAPSKPPLTKAPVLPVGTELPAGTLPSEQLPPFPGPSLTQSQQPLEDLDAQLRRTLSPEXITVTSAVGPVSMAAPTAITEAGTQPQKGVSQVKEGPVLATSSGAGVFKMGRFQVSVAADGAQKEGKNKSEDAKSVHFESSTSESSVLSSSSPESTLVKPEPNGITIPGISSDVPESAHKTTASEAKSDTGQPTKVGRFQVTTTANKVGRFSVSKTEDKITDTKKEGPVASPPFMDLEQAVLPAVIPKKEKPELSEPSHLNGPSSDPEAAFLSRDVDDGSGSPHSPHQLSSKSLPSQNLSQSLSNSFNSSYMSSDNESDIEDEDLKLELRRLRDKHLKEIQDLQSRQKHEIESLYTKLGKVPPAVIIPPAAPLSGRRRRPTKSKGSKSSRSSSLGNKSPQLSGNLSGQSAASVLHPQQTLHPPGNIPESGQNQLLQPLKPSPSSDNLYSAFTSDGAISVPSLSAPGQGTSSTNTVGATVNSQAAQAQPPAMTSSRKGTFTDDLHKLVDNWARDAMNLSGRRGSKGHMNYEGPGMARKFSAPGQLCISMTSNLGGSAPISAASATSLGHFTKSMCPPQQYGFPATPFGAQWSGTGGPAPQPLGQFQPVGTASLQNFNISNLQKSISNPPGSNLRTT

SEQ ID NO: 105 - DNA, 6000 bp, Homo Sapiens
  CDS (1)...(6000)
atgtctggcggcgccgcagagaagcagagcagcactcccggttccctgttcctctcgccgccggctcctgcccccaagaatggctccagctccgattcctccgtgggggagaaactgggagccgcggccgccgacgctgtgaccggcaggaccgaggagtacaggcgccgccgccacactatggacaaggacagccgtggggcggccgcgaccactaccaccactgagcaccgcttcttccgccggagcgtcatctgcgactccaatgccactgcactggagcttcccggccttcctctttccctgccccagcccagcatccccgcggctgtcccgcagagtgctccaccggagccccaccgggaagagaccgtgaccgccaccgccacttcccaggtagcccagcagcctccagccgctgccgcccctggggaacaggccgtcgcgggccctgccccctcgactgtccccagcagtaccagcaaagaccgcccagtgtcccagcctagccttgtggggagcaaagaggagccgccgccggcgagaagtggcagcggcggcggcagcgccaaggagccacaggaggaacggagccagcagcaggatgatatcgaagagctggagaccaaggccgtgggaatgtctaacgatggccgctttctcaagtttgacatcgaaatcggcagaggctcctttaagacggtctacaaaggtctggacactgaaaccaccgtggaagtcgcctggtgtgaactgcaggatcgaaaattaacaaagtctgagaggcagagatttaaagaagaagctgaaatgttaaaaggtcttcagcatcccaatattgttagattttatgattcctgggaatccacagtaaaaggaaagaagtgcattgttttggtgactgaacttatgacgtctggaacacttaaaacgtatctgaaaaggtttaaagtgatgaagatcaaagttctaagaagctggtgccgtcagatccttaaaggtcttcagtttcttcatactcgaactccacctatcattcaccgcgatcttaaatgtgacaacatctttatcaccggccctactggctcagtcaagattggagacctcggtctggcaaccctgaagcgggcttcttttgccaagagtgtgataggtaccccagagttcatggcccctgagatgtatgaggagaaatatgatgaatccgttgacgtttatgcttttgggatgtgcatgcttgagatggctacatctgaatatccttactcggagtgccaaaatgctgcacagatctaccgtcgcgtgaccagtggggtgaagccagccagttttgacaaagtagcaattcctgaagtgaaggaaattattgaaggatgcatacgacaaaacaaagatgaaagatattccatcaaagaccttttgaaccatgccttcttccaagaggaaacaggagtacgggtagaattagcagaagaagatgatggagaaaaaatagccataaaattatggctacgtattgaagatattaagaaattaaagggaaaatacaaagataatgaagctattgagttttcttttgatttagagagagatgtcccagaagatgttgcacaagaaatggtagagtctgggtatgtctgtgaaggtgatcacaagaccatggctaaagctatcaaagacagagtatcattaattaagaggaaacgagagcagcggcagttggtacgggaggagcaagaaaaaaaaaagcaggaagagagcagtctcaaacagcaggtagaacaatccagtgcttcccagacaggaatcaagcagctcccttctgctagcaccggcatacctactgcttctaccacttcagcttcagtttctacacaagtagaacctgaagaacctgaggcagatcaacatcaacaactacagtaccagcaacccagtatatctgtgttatctgatgggacggttgacagtggtcagggatcctctgtcttcacagaatctcgagtgagcagccaacagacagtttcatatggttcccaacatgaacaggcacattctacaggcacagtcccagggcatataccttctactgtccaagcacagtctcagccccatggggtatatccaccctcaagtgtggcacaggggcagagccagggtcagccatcctcaagtagcttaacaggggtttcatcttcccaacccatacaacatcctcagcagcagcagggaatacagcagacagcccctcctcaacagacagtgcagtattcactttcacagacatcaacctccagtgaggccactactgcacagccagtgagtcagcctcaagctccacaagtcttgcctcaagtatcagctggaaaacagagtactcagggagtctctcaggttgctcctgcagagccagttgcagtagcacagccccaagctacccagccgaccactttggcttcctctgtagacagtgcacattcagatgttgcttcaggtatgagtgatggcaatgagaacgtcccatcttccagtggaaggcatgaaggaagaactacaaaacggcattaccgaaaatctgtaaggagtcgctctcgacatgaaaaaacttcacgcccaaaattaagaattttgaatgtttcaaataaaggagaccgagtagtagaatgtcaattagagactcataataggaaaatggttacattcaaatttgacctagatggtgacaaccccgaggagatagcaacaattatggtgaacaatgactttattctagcaatagagagagagtcgtttgtggatcaagtgcgagaaattattgaaaaagctgatgaaatgctcagtgaggatgtcagtgtggaaccagagggtgatcagggattggagagtctacaaggaaaggatgactatggcttttcaggttctcagaaattggaaggagagttcaaacaaccaattcctgcgtcttccatgccacagcaaataggcattcctaccagttctttaactcaagttgttcattctgcgggaaggcggtttatagtgagtcctgtgccagaaagccgattacgagaatcaaaagttttccccagtgaaataacagatacagttgctgcctctacagctcagagccctggaatgaacttgtctcactctgcatcatcccttagtctacaacaggccttttctgaacttagacgtgcccaaatgacagaaggacccaayacagcacctccaaactttagtcatacaggaccaacatttccagtagtacctcctttcttaagtagcattgctggagtcccaaccacagcagcagccacagcaccagtccctgcaacaagcagccctcctaatgacatttccacatcagtaattcagtctgaggttacagtgcccactgaagaggggattgctggagttgccaccagcacaggtgtggtaacttcaggtggtctccccataccacctgtgtctgaatcaccagtactttccagcgtagtttcaagtatcacaatacctgcagttgtctcaatatctactacatccccgtcacttcaagtccccacatccacatctgagatcgttgtttctagtacagcactgtatccttcagtaacagtttcagcaacttcagcctctgcagggggcagtactgctaccccaggtcctaagcctccagctgtagtatctcagcaggcagcaggcagcactactgtgggagccacattaacatcagtttctaccaccacttcattcccaagcacagcttcacagctgtccattcagcttagcagcagtacttctactcctactttagctgaaaccgtggtagttagcgcacactcactagataagacatctcatagcagtacaactggattggctttctccctctctgcaccatcttcctcttcctctcctggagcaggagtgtctagttatatttctcagcctggtgggctgcatcctttggtcattccatcagtgatagcttctactcctattcttccccaagcagcaggacctacttctacacctttattaccccaagtacctagtatcccacccttggtacagcctgttgccaatgtgcctgctgtacagcagacactaattcatagtcagcctcaaccagctttgcttcccaaccagccccatactcattgtcctgaagtagattctgatacacaacccaaagctcctggaattgatgacataaagactctagaagaaaagctgcggtctctgttcagtgaacacagctcatctggagctcagcatgcctctgtctcactggagacctcactagtcatagagagcactgtcacaccaggcatcccaactactgctgttgcaccaagcaaactcctgacttctaccacaagtacttgcttaccaccaaccaatttaccactaggaacagttgctttgccagttacaccagtggtcacacctgggcaagtttctaccccagtcagcactactacatcaggagtgaaacctggaactgctccctccaagccacctctaactaaggctccggtgctgccagtgggtactgaacttccagcaggtactctacccagcgagcagctgccaccttttccaggaccttctctaacccagtcccagcaacctctagaggatcttgatgctcaattgagaagaacacttagtccagagatkatcacagtgacttctgcggttggtcctgtgtccatggcggctccaacagcaatcacagaagcaggaacacagcctcagaagggtgtttctcaagtcaaagaaggccctgtcctagcaactagttcaggagctggtgtttttaagatgggacgatttcaggtttctgttgcagcagacggtgcccagaaagagggtaaaaataagtcagaagatgcaaagtctgttcattttgaatccagcacctcagagtcctcagtgctatcaagtagtagtccagagagtaccttggtgaaaccagagccgaatggcataaccatccctggtatctcttcagatgtgccagagagtgcccacaaaactactgcctcagaggcaaagtcagacactgggcagcctaccaaggttggacgttttcaggtgacaactacagcaaacaaagtgggtcgtttctctgtatcaaaaactgaggacaagatcactgacacaaagaaagaaggaccagtggcatctcctccttttatggatttggaacaagctgttcttcctgctgtgataccaaagaaagagaagcctgaactgtcagagccttcacatctaaatgggccgtcttctgacccggaggccgcttttttaagtagggatgtggatgatggttccggtagtccacactcgccccatcagctgagctcaaagagccttcctagccagaatctaagtcaaagccttagtaattcatttaactcctcttacatgagtagcgacaatgagtcagatatcgaagatgaagacttaaagttagagctgcgacgactacgagataaacatctcaaagagattcaggacctgcagagtcgccagaagcatgaaattgaatctttgtataccaaactgggcaaggtgccccctgctgttattattcccccagctgctcccctttcagggagaagacgacgacccactaaaagcaaaggcagcaaatctagtcgaagcagttccttggggaataaaagcccccagctttcaggtaacctgtctggtcagagtgcagcttcagtcttgcacccccagcagaccctccaccctcctggcaacatcccagagtccgggcagaatcagctgttacagccccttaagccatctccctccagtgacaacctctattcagccttcaccagtgatggtgccatttcagtaccaagcctttctgctccaggtcaaggaataaagcaaccatcatcgtccaaaaacaataaaatggagatgttgccatacctgggacaaaagcctgttaaggcgggttgggagactagctga

SEQ ID NO: 106 - protein, 1999 aa, Homo Sapiens
  VARIANT 1562: Xaa = Any Amino Acid
MSGGAAEKQSSTPGSLFLSPPAPAPKNGSSSDSSVGEKLGAAAADAVTGRTEEYRRRRHTMDKDSRGAAATTTTTEHRFFRRSVICDSNATALELPGLPLSLPQPSIPAAVPQSAPPEPHREETVTATATSQVAQQPPAAAAPGEQAVAGPAPSTVPSSTSKDRPVSQPSLVGSKEEPPPARSGSGGGSAKEPQEERSQQQDDIEELETKAVGMSNDGRFLKFDIEIGRGSFKTVYKGLDTETTVEVAWCELQDRKLTKSERQRFKEEAEMLKGLQHPNIVRFYDSWESTVKGKKCIVLVTELMTSGTLKTYLKRFKVMKIKVLRSWCRQILKGLQFLHTRTPPIIHRDLKCDNIFITGPTGSVKIGDLGLATLKRASFAKSVIGTPEFMAPEMYEEKYDESVDVYAFGMCMLEMATSEYPYSECQNAAQIYRRVTSGVKPASFDKVAIPEVKEIIEGCIRQNKDERYSIKDLLNHAFFQEETGVRVELAEEDDGEKIAIKLWLRIEDIKKLKGKYKDNEAIEFSFDLERDVPEDVAQEMVESGYVCEGDHKTMAKAIKDRVSLIKRKREQRQLVREEQEKKKQEESSLKQQVEQSSASQTGIKQLPSASTGIPTASTTSASVSTQVEPEEPEADQHQQLQYQQPSISVLSDGTVDSGQGSSVFTESRVSSQQTVSYGSQHEQAHSTGTVPGHIPSTVQAQSQPHGVYPPSSVAQGQSQGQPSSSSLTGVSSSQPIQHPQQQQGIQQTAPPQQTVQYSLSQTSTSSEATTAQPVSQPQAPQVLPQVSAGKQSTQGVSQVAPAEPVAVAQPQATQPTTLASSVDSAHSDVASGMSDGNENVPSSSGRHEGRTTKRHYRKSVRSRSRHEKTSRPKLRILNVSNKGDRVVECQLETHNRKMVTFKFDLDGDNPEEIATIMVNNDFILAIERESFVDQVREIIEKADEMLSEDVSVEPEGDQGLESLQGKDDYGFSGSQKLEGEFKQPIPASSMPQQIGIPTSSLTQVVHSAGRRFIVSPVPESRLRESKVFPSEITDTVAASTAQSPGMNLSHSASSLSLQQAFSELRRAQMTEGPNTAPPNFSHTGPTFPVVPPFLSSIAGVPTTAAATAPVPATSSPPNDISTSVIQSEVTVPTEEGIAGVATSTGVVTSGGLPIPPVSESPVLSSVVSSITIPAVVSISTTSPSLQVPTSTSEIVVSSTALYPSVTVSATSASAGGSTATPGPKPPAVVSQQAAGSTTVGATLTSVSTTTSFPSTASQLSIQLSSSTSTPTLAETVVVSAHSLDKTSHSSTTGLAFSLSAPSSSSSPGAGVSSYISQPGGLHPLVIPSVIASTPILPQAAGPTSTPLLPQVPSIPPLVQPVANVPAVQQTLIHSQPQPALLPNQPHTHCPEVDSDTQPKAPGIDDIKTLEEKLRSLFSEHSSSGAQHASVSLETSLVIESTVTPGIPTTAVAPSKLLTSTTSTCLPPTNLPLGTVALPVTPVVTPGQVSTPVSTTTSGVKPGTAPSKPPLTKAPVLPVGTELPAGTLPSEQLPPFPGPSLTQSQQPLEDLDAQLRRTLSPEXITVTSAVGPVSMAAPTAITEAGTQPQKGVSQVKEGPVLATSSGAGVFKMGRFQVSVAADGAQKEGKNKSEDAKSVHFESSTSESSVLSSSSPESTLVKPEPNGITIPGISSDVPESAHKTTASEAKSDTGQPTKVGRFQVTTTANKVGRFSVSKTEDKITDTKKEGPVASPPFMDLEQAVLPAVIPKKEKPELSEPSHLNGPSSDPEAAFLSRDVDDGSGSPHSPHQLSSKSLPSQNLSQSLSNSFNSSYMSSDNESDIEDEDLKLELRRLRDKHLKEIQDLQSRQKHEIESLYTKLGKVPPAVIIPPAAPLSGRRRRPTKSKGSKSSRSSSLGNKSPQLSGNLSGQSAASVLHPQQTLHPPGNIPESGQNQLLQPLKPSPSSDNLYSAFTSDGAISVPSLSAPGQGIKQPSSSKNNKMEMLPYLGQKPVKAGWETS

SEQ ID NO: 107 - DNA, 7065 bp, Homo Sapiens
  CDS (1)...(7065)
atgtctggcggcgccgcagagaagcagagcagcactcccggttccctgttcctctcgccgccggctcctgcccccaagaatggctccagctccgattcctccgtgggggagaaactgggagccgcggccgccgacgctgtgaccggcaggaccgaggagtacaggcgccgccgccacactatggacaaggacagccgtggggcggccgcgaccactaccaccactgagcaccgcttcttccgccggagcgtcatctgcgactccaatgccactgcactggagcttcccggccttcctctttccctgccccagcccagcatccccgcggctgtcccgcagagtgctccaccggagccccaccgggaagagaccgtgaccgccaccgccacttcccaggtagcccagcagcctccagccgctgccgcccctggggaacaggccgtcgcgggccctgccccctcgactgtccccagcagtaccagcaaagaccgcccagtgtcccagcctagccttgtggggagcaaagaggagccgccgccggcgagaagtggcagcggcggcggcagcgccaaggagccacaggaggaacggagccagcagcaggatgatatcgaagagctggagaccaaggccgtgggaatgtctaacgatggccgctttctcaagtttgacatcgaaatcggcagaggctcctttaagacggtctacaaaggtctggacactgaaaccaccgtggaagtcgcctggtgtgaactgcaggatcgaaaattaacaaagtctgagaggcagagatttaaagaagaagctgaaatgttaaaaggtcttcagcatcccaatattgttagattttatgattcctgggaatccacagtaaaaggaaagaagtgcattgttttggtgactgaacttatgacgtctggaacacttaaaacgtatctgaaaaggtttaaagtgatgaagatcaaagttctaagaagctggtgccgtcagatccttaaaggtcttcagtttcttcatactcgaactccacctatcattcaccgcgatcttaaatgtgacaacatctttatcaccggccctactggctcagtcaagattggagacctcggtctggcaaccctgaagcgggcttcttttgccaagagtgtgataggtaccccagagttcatggcccctgagatgtatgaggagaaatatgatgaatccgttgacgtttatgcttttgggatgtgcatgcttgagatggctacatctgaatatccttactcggagtgccaaaatgctgcacagatctaccgtcgcgtgaccagtggggtgaagccagccagttttgacaaagtagcaattcctgaagtgaaggaaattattgaaggatgcatacgacaaaacaaagatgaaagatattccatcaaagaccttttgaaccatgccttcttccaagaggaaacaggagtacgggtagaattagcagaagaagatgatggagaaaaaatagccataaaattatggctacgtattgaagatattaagaaattaaagggaaaatacaaagataatgaagctattgagttttcttttgatttagagagagatgtcccagaagatgttgcacaagaaatggtagagtctgggtatgtctgtgaaggtgatcacaagaccatggctaaagctatcaaagacagagtatcattaattaagaggaaacgagagcagcggcagttggtacgggaggagcaagaaaaaaaaaagcaggaagagagcagtctcaaacagcaggtagaacaatccagtgcttcccagacaggaatcaagcagctcccttctgctagcaccggcatacctactgcttctaccacttcagcttcagtttctacacaagtagaacctgaagaacctgaggcagatcaacatcaacaactacagtaccagcaacccagtatatctgtgttatctgatgggacggttgacagtggtcagggatcctctgtcttcacagaatctcgagtgagcagccaacagacagtttcatatggttcccaacatgaacaggcacattctacaggcacagtcccagggcatataccttctactgtccaagcacagtctcagccccatggggtatatccaccctcaagtgtgcagcagggaatacagcagacagcccctcctcaacagacagtgcagtattcactttcacagacatcaacctccagtgaggccactactgcacagccagtgagtcagcctcaagctccacaagtcttgcctcaagtatcagctggaaaacagcttccagtttcccagccagtaccaactatccaaggcgaacctcagatcccagttgcgacacaaccctcggttgttccagtccactctggtgctcatttccttccagtgggacagccgctccctactcccttgctccctcagtaccctgtctctcagattcccatatcaactcctcatgtgtctacggctcagacaggtttctcatcccttcccatcacaatggcagctggcattactcagcctctgctcacgttggcttcatctgctacaacagctgcgatcccgggggtatcaactgtggttcctagtcagcttccaacccttctgcagcctgtgactcagctgccaagtcaggttcacccacagctcctacaaccagcagttcagtccatgggaataccagctaaccttggacaagctgctgaggttccactttcctctggagatgttctgtaccagggcttcccacctcgactgccaccacagtacccaggagattcaaatattgctccctcttccaacgtggcttctgtttgcatccattctacagtcctawcccctcccatgccgacagaagtactggctacacctgggtactttcccacagtggtgcagccttatgtggaatcaaatcttttagttcctatgggtggtgtaggaggacaggttcaagtgtcccagccaggagggagtttagcacaagcccccactacatcctcccagcaagcagttttggagagtactcagggagtctctcaggttgctcctgcagagccagttgcagtagcacagccccaagctacccagccgaccactttggcttcctctgtagacagtgcacattcagatgttgcttcaggtatgagtgatggcaatgagaacgtcccatcttccagtggaaggcatgaaggaagaactacaaaacggcattaccgaaaatctgtaaggagtcgctctcgacatgaaaaaacttcacgcccaaaattaagaattttgaatgtttcaaataaaggagaccgagtagtagaatgtcaattagagactcataataggaaaatggttacattcaaatttgacctagatggtgacaaccccgaggagatagcaacaattatggtgaacaatgactttattctagcaatagagagagagtcgtttgtggatcaagtgcgagaaattattgaaaaagctgatgaaatgctcagtgaggatgtcagtgtggaaccagagggtgatcagggattggagagtctacaaggaaaggatgactatggcttttcaggttctcagaaattggaaggagagttcaaacaaccaattcctgcgtcttccatgccacagcaaataggcattcctaccagttctttaactcaagttgttcattctgcgggaaggcggtttatagtgagtcctgtgccagaaagccgattacgagaatcaaaagttttccccagtgaaataacagatacagttgctgcctctacagctcagagccctggaatgaacttgtctcactctgcatcatcccttagtctacaacaggccttttctgaacttagacgtgcccaaatgacagaaggacccaayacagcacctccaaactttagtcatacaggaccaacatttccagtagtacctcctttcttaagtagcattgctggagtcccaaccacagcagcagccacagcaccagtccctgcaacaagcagccctcctaatgacatttccacatcagtaattcagtctgaggttacagtgcccactgaagaggggattgctggagttgccaccagcacaggtgtggtaacttcaggtggtctccccataccacctgtgtctgaatcaccagtactttccagcgtagtttcaagtatcacaatacctgcagttgtctcaatatctactacatccccgtcacttcaagtccccacatccacatctgagatcgttgtttctagtacagcactgtatccttcagtaacagtttcagcaacttcagcctctgcagggggcagtactgctaccccaggtcctaagcctccagctgtagtatctcagcaggcagcaggcagcactactgtgggagccacattaacatcagtttctaccaccacttcattcccaagcacagcttcacagctgtccattcagcttagcagcagtacttctactcctactttagctgaaaccgtggtagttagcgcacactcactagataagacatctcatagcagtacaactggattggctttctccctctctgcaccatcttcctcttcctctcctggagcaggagtgtctagttatatttctcagcctggtgggctgcatcctttggtcattccatcagtgatagcttctactcctattcttccccaagcagcaggacctacttctacacctttattaccccaagtacctagtatcccacccttggtacagcctgttgccaatgtgcctgctgtacagcagacactaattcatagtcagcctcaaccagctttgcttcccaaccagccccatactcattgtcctgaagtagattctgatacacaacccaaagctcctggaattgatgacataaagactctagaagaaaagctgcggtctctgttcagtgaacacagctcatctggagctcagcatgcctctgtctcactggagacctcactagtcatagagagcactgtcacaccaggcatcccaactactgctgttgcaccaagcaaactcctgacttctaccacaagtacttgcttaccaccaaccaatttaccactaggaacagttgctttgccagttacaccagtggtcacacctgggcaagtttctaccccagtcagcactactacatcaggagtgaaacctggaactgctccctccaagccacctctaactaaggctccggtgctgccagtgggtactgaacttccagcaggtactctacccagcgagcagctgccaccttttccaggaccttctctaacccagtcccagcaacctctagaggatcttgatgctcaattgagaagaacacttagtccagagatkatcacagtgacttctgcggttggtcctgtgtccatggcggctccaacagcaatcacagaagcaggaacacagcctcagaagggtgtttctcaagtcaaagaaggccctgtcctagcaactagttcaggagctggtgtttttaagatgggacgatttcaggtttctgttgcagcagacggtgcccagaaagagggtaaaaataagtcagaagatgcaaagtctgttcattttgaatccagcacctcagagtcctcagtgctatcaagtagtagtccagagagtaccttggtgaaaccagagccgaatggcataaccatccctggtatctcttcagatgtgccagagagtgcccacaaaactactgcctcagaggcaaagtcagacactgggcagcctaccaaggttggacgttttcaggtgacaactacagcaaacaaagtgggtcgtttctctgtatcaaaaactgaggacaagatcactgacacaaagaaagaaggaccagtggcatctcctccttttatggatttggaacaagctgttcttcctgctgtgataccaaagaaagagaagcctgaactgtcagagccttcacatctaaatgggccgtcttctgacccggaggccgcttttttaagtagggatgtggatgatggttccggtagtccacactcgccccatcagctgagctcaaagagccttcctagccagaatctaagtcaaagccttagtaattcatttaactcctcttacatgagtagcgacaatgagtcagatatcgaagatgaagacttaaagttagagctgcgacgactacgagataaacatctcaaagagattcaggacctgcagagtcgccagaagcatgaaattgaatctttgtataccaaactgggcaaggtgccccctgctgttattattcccccagctgctcccctttcagggagaagacgacgacccactaaaagcaaaggcagcaaatctagtcgaagcagttccttggggaataaaagcccccagctttcaggtaacctgtctggtcagagtgcagcttcagtcttgcacccccagcagaccctccaccctcctggcaacatcccagagtccgggcagaatcagctgttacagccccttaagccatctccctccagtgacaacctctattcagccttcaccagtgatggtgccatttcagtaccaagcctttctgctccaggtcaaggaaccagcagcacaaacactgttggggcaacagtgaacagccaagccgcccaagctcagcctcctgccatgacgtccagcaggaagggcacattcacagatgacttgcacaagttggtagacaattgggcccgagatgccatgaatctctcaggcaggagaggaagcaaagggcacatgaattatgagggccctggaatggcaaggaagttctctgcacctgggcaactgtgcatctccatgacctcgaacctgggtggctctgcccccatctctgcagcatcagctacctctctaggtcacttcaccaagtctatgtgccccccacagcagtatggctttccagctaccccatttggcgctcaatggagtgggacgggtggcccagcaccacagccacttggccagttccaacctgtgggaactgcctccttgcagaatttcaacatcagcaatttgcagaaatccatcagcaaccccccaggctccaacctgcggaccacttag

SEQ ID NO: 108 - protein, 2354 aa, Homo Sapiens
  VARIANT 949, 1780: Xaa = Any Amino Acid
MSGGAAEKQSSTPGSLFLSPPAPAPKNGSSSDSSVGEKLGAAAADAVTGRTEEYRRRRHTMDKDSRGAAATTTTTEHRFFRRSVICDSNATALELPGLPLSLPQPSIPAAVPQSAPPEPHREETVTATATSQVAQQPPAAAAPGEQAVAGPAPSTVPSSTSKDRPVSQPSLVGSKEEPPPARSGSGGGSAKEPQEERSQQQDDIEELETKAVGMSNDGRFLKFDIEIGRGSFKTVYKGLDTETTVEVAWCELQDRKLTKSERQRFKEEAEMLKGLQHPNIVRFYDSWESTVKGKKCIVLVTELMTSGTLKTYLKRFKVMKIKVLRSWCRQILKGLQFLHTRTPPIIHRDLKCDNIFITGPTGSVKIGDLGLATLKRASFAKSVIGTPEFMAPEMYEEKYDESVDVYAFGMCMLEMATSEYPYSECQNAAQIYRRVTSGVKPASFDKVAIPEVKEIIEGCIRQNKDERYSIKDLLNHAFFQEETGVRVELAEEDDGEKIAIKLWLRIEDIKKLKGKYKDNEAIEFSFDLERDVPEDVAQEMVESGYVCEGDHKTMAKAIKDRVSLIKRKREQRQLVREEQEKKKQEESSLKQQVEQSSASQTGIKQLPSASTGIPTASTTSASVSTQVEPEEPEADQHQQLQYQQPSISVLSDGTVDSGQGSSVFTESRVSSQQTVSYGSQHEQAHSTGTVPGHIPSTVQAQSQPHGVYPPSSVQQGIQQTAPPQQTVQYSLSQTSTSSEATTAQPVSQPQAPQVLPQVSAGKQLPVSQPVPTIQGEPQIPVATQPSVVPVHSGAHFLPVGQPLPTPLLPQYPVSQIPISTPHVSTAQTGFSSLPITMAAGITQPLLTLASSATTAAIPGVSTVVPSQLPTLLQPVTQLPSQVHPQLLQPAVQSMGIPANLGQAAEVPLSSGDVLYQGFPPRLPPQYPGDSNIAPSSNVASVCIHSTVLXPPMPTEVLATPGYFPTVVQPYVESNLLVPMGGVGGQVQVSQPGGSLAQAPTTSSQQAVLESTQGVSQVAPAEPVAVAQPQATQPTTLASSVDSAHSDVASGMSDGNENVPSSSGRHEGRTTKRHYRKSVRSRSRHEKTSRPKLRILNVSNKGDRVVECQLETHNRKMVTFKFDLDGDNPEEIATIMVNNDFILAIERESFVDQVREIIEKADEMLSEDVSVEPEGDQGLESLQGKDDYGFSGSQKLEGEFKQPIPASSMPQQIGIPTSSLTQVVHSAGRRFIVSPVPESRLRESKVFPSEITDTVAASTAQSPGMNLSHSASSLSLQQAFSELRRAQMTEGPNTAPPNFSHTGPTFPVVPPFLSSIAGVPTTAAATAPVPATSSPPNDISTSVIQSEVTVPTEEGIAGVATSTGVVTSGGLPIPPVSESPVLSSVVSSITIPAVVSISTTSPSLQVPTSTSEIVVSSTALYPSVTVSATSASAGGSTATPGPKPPAVVSQQAAGSTTVGATLTSVSTTTSFPSTASQLSIQLSSSTSTPTLAETVVVSAHSLDKTSHSSTTGLAFSLSAPSSSSSPGAGVSSYISQPGGLHPLVIPSVIASTPILPQAAGPTSTPLLPQVPSIPPLVQPVANVPAVQQTLIHSQPQPALLPNQPHTHCPEVDSDTQPKAPGIDDIKTLEEKLRSLFSEHSSSGAQHASVSLETSLVIESTVTPGIPTTAVAPSKLLTSTTSTCLPPTNLPLGTVALPVTPVVTPGQVSTPVSTTTSGVKPGTAPSKPPLTKAPVLPVGTELPAGTLPSEQLPPFPGPSLTQSQQPLEDLDAQLRRTLSPEXITVTSAVGPVSMAAPTAITEAGTQPQKGVSQVKEGPVLATSSGAGVFKMGRFQVSVAADGAQKEGKNKSEDAKSVHFESSTSESSVLSSSSPESTLVKPEPNGITIPGISSDVPESAHKTTASEAKSDTGQPTKVGRFQVTTTANKVGRFSVSKTEDKITDTKKEGPVASPPFMDLEQAVLPAVIPKKEKPELSEPSHLNGPSSDPEAAFLSRDVDDGSGSPHSPHQLSSKSLPSQNLSQSLSNSFNSSYMSSDNESDIEDEDLKLELRRLRDKHLKEIQDLQSRQKHEIESLYTKLGKVPPAVIIPPAAPLSGRRRRPTKSKGSKSSRSSSLGNKSPQLSGNLSGQSAASVLHPQQTLHPPGNIPESGQNQLLQPLKPSPSSDNLYSAFTSDGAISVPSLSAPGQGTSSTNTVGATVNSQAAQAQPPAMTSSRKGTFTDDLHKLVDNWARDAMNLSGRRGSKGHMNYEGPGMARKFSAPGQLCISMTSNLGGSAPISAASATSLGHFTKSMCPPQQYGFPATPFGAQWSGTGGPAPQPLGQFQPVGTASLQNFNISNLQKSISNPPGSNLRTT

SEQ ID NO: 109 - DNA, 6654 bp, Homo Sapiens
  CDS (1)...(6654)
atgtctggcggcgccgcagagaagcagagcagcactcccggttccctgttcctctcgccgccggctcctgcccccaagaatggctccagctccgattcctccgtgggggagaaactgggagccgcggccgccgacgctgtgaccggcaggaccgaggagtacaggcgccgccgccacactatggacaaggacagccgtggggcggccgcgaccactaccaccactgagcaccgcttcttccgccggagcgtcatctgcgactccaatgccactgcactggagcttcccggccttcctctttccctgccccagcccagcatccccgcggctgtcccgcagagtgctccaccggagccccaccgggaagagaccgtgaccgccaccgccacttcccaggtagcccagcagcctccagccgctgccgcccctggggaacaggccgtcgcgggccctgccccctcgactgtccccagcagtaccagcaaagaccgcccagtgtcccagcctagccttgtggggagcaaagaggagccgccgccggcgagaagtggcagcggcggcggcagcgccaaggagccacaggaggaacggagccagcagcaggatgatatcgaagagctggagaccaaggccgtgggaatgtctaacgatggccgctttctcaagtttgacatcgaaatcggcagaggctcctttaagacggtctacaaaggtctggacactgaaaccaccgtggaagtcgcctggtgtgaactgcaggatcgaaaattaacaaagtctgagaggcagagatttaaagaagaagctgaaatgttaaaaggtcttcagcatcccaatattgttagattttatgattcctgggaatccacagtaaaaggaaagaagtgcattgttttggtgactgaacttatgacgtctggaacacttaaaacgtatctgaaaaggtttaaagtgatgaagatcaaagttctaagaagctggtgccgtcagatccttaaaggtcttcagtttcttcatactcgaactccacctatcattcaccgcgatcttaaatgtgacaacatctttatcaccggccctactggctcagtcaagattggagacctcggtctggcaaccctgaagcgggcttcttttgccaagagtgtgataggtaccccagagttcatggcccctgagatgtatgaggagaaatatgatgaatccgttgacgtttatgcttttgggatgtgcatgcttgagatggctacatctgaatatccttactcggagtgccaaaatgctgcacagatctaccgtcgcgtgaccagtggggtgaagccagccagttttgacaaagtagcaattcctgaagtgaaggaaattattgaaggatgcatacgacaaaacaaagatgaaagatattccatcaaagaccttttgaaccatgccttcttccaagaggaaacaggagtacgggtagaattagcagaagaagatgatggagaaaaaatagccataaaattatggctacgtattgaagatattaagaaattaaagggaaaatacaaagataatgaagctattgagttttcttttgatttagagagagatgtcccagaagatgttgcacaagaaatggtagagtctgggtatgtctgtgaaggtgatcacaagaccatggctaaagctatcaaagacagagtatcattaattaagaggaaacgagagcagcggcagttggtacgggaggagcaagaaaaaaaaaagcaggaagagagcagtctcaaacagcaggtagaacaatccagtgcttcccagacaggaatcaagcagctcccttctgctagcaccggcatacctactgcttctaccacttcagcttcagtttctacacaagtagaacctgaagaacctgaggcagatcaacatcaacaactacagtaccagcaacccagtatatctgtgttatctgatgggacggttgacagtggtcagggatcctctgtcttcacagaatctcgagtgagcagccaacagacagtttcatatggttcccaacatgaacaggcacattctacaggcacagtcccagggcatataccttctactgtccaagcacagtctcagccccatggggtatatccaccctcaagtgtgcagcagggaatacagcagacagcccctcctcaacagacagtgcagtattcactttcacagacatcaacctccagtgaggccactactgcacagccagtgagtcagcctcaagctccacaagtcttgcctcaagtatcagctggaaaacagcttccagtttcccagccagtaccaactatccaaggcgaacctcagatcccagttgcgacacaaccctcggttgttccagtccactctggtgctcatttccttccagtgggacagccgctccctactcccttgctccctcagtaccctgtctctcagattcccatatcaactcctcatgtgtctacggctcagacaggtttctcatcccttcccatcacaatggcagctggcattactcagcctctgctcacgttggcttcatctgctacaacagctgcgatcccgggggtatcaactgtggttcctagtcagcttccaacccttctgcagcctgtgactcagctgccaagtcaggttcacccacagctcctacaaccagcagttcagtccatgggaataccagctaaccttggacaagctgctgaggttccactttcctctggagatgttctgtaccagggcttcccacctcgactgccaccacagtacccaggagattcaaatattgctccctcttccaacgtggcttctgtttgcatccattctacagtcctawcccctcccatgccgacagaagtactggctacacctgggtactttcccacagtggtgcagccttatgtggaatcaaatcttttagttcctatgggtggtgtaggaggacaggttcaagtgtcccagccaggagggagtttagcacaagcccccactacatcctcccagcaagcagttttggagagtactcagggagtctctcaggttgctcctgcagagccagttgcagtagcacagccccaagctacccagccgaccactttggcttcctctgtagacagtgcacattcagatgttgcttcaggtatgagtgatggcaatgagaacgtcccatcttccagtggaaggcatgaaggaagaactacaaaacggcattaccgaaaatctgtaaggagtcgctctcgacatgaaaaaacttcacgcccaaaattaagaattttgaatgtttcaaataaaggagaccgagtagtagaatgtcaattagagactcataataggaaaatggttacattcaaatttgacctagatggtgacaaccccgaggagatagcaacaattatggtgaacaatgactttattctagcaatagagagagagtcgtttgtggatcaagtgcgagaaattattgaaaaagctgatgaaatgctcagtgaggatgtcagtgtggaaccagagggtgatcagggattggagagtctacaaggaaaggatgactatggcttttcaggttctcagaaattggaaggagagttcaaacaaccaattcctgcgtcttccatgccacagcaaataggcattcctaccagttctttaactcaagttgttcattctgcgggaaggcggtttatagtgagtcctgtgccagaaagccgattacgagaatcaaaagttttccccagtgaaataacagatacagttgctgcctctacagctcagagccctggaatgaacttgtctcactctgcatcatcccttagtctacaacaggccttttctgaacttagacgtgcccaaatgacagaaggacccaayacagcacctccaaactttagtcatacaggaccaacatttccagtagtacctcctttcttaagtagcattgctggagtcccaaccacagcagcagccacagcaccagtccctgcaacaagcagccctcctaatgacatttccacatcagtaattcagtctgaggttacagtgcccactgaagaggggattgctggagttgccaccagcacaggtgtggtaacttcaggtggtctccccataccacctgtgtctgaatcaccagtactttccagcgtagtttcaagtatcacaatacctgcagttgtctcaatatctactacatccccgtcacttcaagtccccacatccacatctgagatcgttgtttctagtacagcactgtatccttcagtaacagtttcagcaacttcagcctctgcagggggcagtactgctaccccaggtcctaagcctccagctgtagtatctcagcaggcagcaggcagcactactgtgggagccacattaacatcagtttctaccaccacttcattcccaagcacagcttcacagctgtccattcagcttagcagcagtacttctactcctactttagctgaaaccgtggtagttagcgcacactcactagataagacatctcatagcagtacaactggattggctttctccctctctgcaccatcttcctcttcctctcctggagcaggagtgtctagttatatttctcagcctggtgggctgcatcctttggtcattccatcagtgatagcttctactcctattcttccccaagcagcaggacctacttctacacctttattaccccaagtacctagtatcccacccttggtacagcctgttgccaatgtgcctgctgtacagcagacactaattcatagtcagcctcaaccagctttgcttcccaaccagccccatactcattgtcctgaagtagattctgatacacaacccaaagctcctggaattgatgacataaagactctagaagaaaagctgcggtctctgttcagtgaacacagctcatctggagctcagcatgcctctgtctcactggagacctcactagtcatagagagcactgtcacaccaggcatcccaactactgctgttgcaccaagcaaactcctgacttctaccacaagtacttgcttaccaccaaccaatttaccactaggaacagttgctttgccagttacaccagtggtcacacctgggcaagtttctaccccagtcagcactactacatcaggagtgaaacctggaactgctccctccaagccacctctaactaaggctccggtgctgccagtgggtactgaacttccagcaggtactctacccagcgagcagctgccaccttttccaggaccttctctaacccagtcccagcaacctctagaggatcttgatgctcaattgagaagaacacttagtccagagatkatcacagtgacttctgcggttggtcctgtgtccatggcggctccaacagcaatcacagaagcaggaacacagcctcagaagggtgtttctcaagtcaaagaaggccctgtcctagcaactagttcaggagctggtgtttttaagatgggacgatttcaggtttctgttgcagcagacggtgcccagaaagagggtaaaaataagtcagaagatgcaaagtctgttcattttgaatccagcacctcagagtcctcagtgctatcaagtagtagtccagagagtaccttggtgaaaccagagccgaatggcataaccatccctggtatctcttcagatgtgccagagagtgcccacaaaactactgcctcagaggcaaagtcagacactgggcagcctaccaaggttggacgttttcaggtgacaactacagcaaacaaagtgggtcgtttctctgtatcaaaaactgaggacaagatcactgacacaaagaaagaaggaccagtggcatctcctccttttatggatttggaacaagctgttcttcctgctgtgataccaaagaaagagaagcctgaactgtcagagccttcacatctaaatgggccgtcttctgacccggaggccgcttttttaagtagggatgtggatgatggttccggtagtccacactcgccccatcagctgagctcaaagagccttcctagccagaatctaagtcaaagccttagtaattcatttaactcctcttacatgagtagcgacaatgagtcagatatcgaagatgaagacttaaagttagagctgcgacgactacgagataaacatctcaaagagattcaggacctgcagagtcgccagaagcatgaaattgaatctttgtataccaaactgggcaaggtgccccctgctgttattattcccccagctgctcccctttcagggagaagacgacgacccactaaaagcaaaggcagcaaatctagtcgaagcagttccttggggaataaaagcccccagctttcaggtaacctgtctggtcagagtgcagcttcagtcttgcacccccagcagaccctccaccctcctggcaacatcccagagtccgggcagaatcagctgttacagccccttaagccatctccctccagtgacaacctctattcagccttcaccagtgatggtgccatttcagtaccaagcctttctgctccaggtcaaggaataaagcaaccatcatcgtccaaaaacaataaaatggagatgttgccatacctgggacaaaagcctgttaaggcgggttgggagactagctga

SEQ ID NO: 110 - protein, 2217 aa, Homo Sapiens
  VARIANT 949, 1780: Xaa = Any Amino Acid
MSGGAAEKQSSTPGSLFLSPPAPAPKNGSSSDSSVGEKLGAAAADAVTGRTEEYRRRRHTMDKDSRGAAATTTTTEHRFFRRSVICDSNATALELPGLPLSLPQPSIPAAVPQSAPPEPHREETVTATATSQVAQQPPAAAAPGEQAVAGPAPSTVPSSTSKDRPVSQPSLVGSKEEPPPARSGSGGGSAKEPQEERSQQQDDIEELETKAVGMSNDGRFLKFDIEIGRGSFKTVYKGLDTETTVEVAWCELQDRKLTKSERQRFKEEAEMLKGLQHPNIVRFYDSWESTVKGKKCIVLVTELMTSGTLKTYLKRFKVMKIKVLRSWCRQILKGLQFLHTRTPPIIHRDLKCDNIFITGPTGSVKIGDLGLATLKRASFAKSVIGTPEFMAPEMYEEKYDESVDVYAFGMCMLEMATSEYPYSECQNAAQIYRRVTSGVKPASFDKVAIPEVKEIIEGCIRQNKDERYSIKDLLNHAFFQEETGVRVELAEEDDGEKIAIKLWLRIEDIKKLKGKYKDNEAIEFSFDLERDVPEDVAQEMVESGYVCEGDHKTMAKAIKDRVSLIKRKREQRQLVREEQEKKKQEESSLKQQVEQSSASQTGIKQLPSASTGIPTASTTSASVSTQVEPEEPEADQHQQLQYQQPSISVLSDGTVDSGQGSSVFTESRVSSQQTVSYGSQHEQAHSTGTVPGHIPSTVQAQSQPHGVYPPSSVQQGIQQTAPPQQTVQYSLSQTSTSSEATTAQPVSQPQAPQVLPQVSAGKQLPVSQPVPTIQGEPQIPVATQPSVVPVHSGAHFLPVGQPLPTPLLPQYPVSQIPISTPHVSTAQTGFSSLPITMAAGITQPLLTLASSATTAAIPGVSTVVPSQLPTLLQPVTQLPSQVHPQLLQPAVQSMGIPANLGQAAEVPLSSGDVLYQGFPPRLPPQYPGDSNIAPSSNVASVCIHSTVLXPPMPTEVLATPGYFPTVVQPYVESNLLVPMGGVGGQVQVSQPGGSLAQAPTTSSQQAVLESTQGVSQVAPAEPVAVAQPQATQPTTLASSVDSAHSDVASGMSDGNENVPSSSGRHEGRTTKRHYRKSVRSRSRHEKTSRPKLRILNVSNKGDRVVECQLETHNRKMVTFKFDLDGDNPEEIATIMVNNDFILAIERESFVDQVREIIEKADEMLSEDVSVEPEGDQGLESLQGKDDYGFSGSQKLEGEFKQPIPASSMPQQIGIPTSSLTQVVHSAGRRFIVSPVPESRLRESKVFPSEITDTVAASTAQSPGMNLSHSASSLSLQQAFSELRRAQMTEGPNTAPPNFSHTGPTFPVVPPFLSSIAGVPTTAAATAPVPATSSPPNDISTSVIQSEVTVPTEEGIAGVATSTGVVTSGGLPIPPVSESPVLSSVVSSITIPAVVSISTTSPSLQVPTSTSEIVVSSTALYPSVTVSATSASAGGSTATPGPKPPAVVSQQAAGSTTVGATLTSVSTTTSFPSTASQLSIQLSSSTSTPTLAETVVVSAHSLDKTSHSSTTGLAFSLSAPSSSSSPGAGVSSYISQPGGLHPLVIPSVIASTPILPQAAGPTSTPLLPQVPSIPPLVQPVANVPAVQQTLIHSQPQPALLPNQPHTHCPEVDSDTQPKAPGIDDIKTLEEKLRSLFSEHSSSGAQHASVSLETSLVIESTVTPGIPTTAVAPSKLLTSTTSTCLPPTNLPLGTVALPVTPVVTPGQVSTPVSTTTSGVKPGTAPSKPPLTKAPVLPVGTELPAGTLPSEQLPPFPGPSLTQSQQPLEDLDAQLRRTLSPEXITVTSAVGPVSMAAPTAITEAGTQPQKGVSQVKEGPVLATSSGAGVFKMGRFQVSVAADGAQKEGKNKSEDAKSVHFESSTSESSVLSSSSPESTLVKPEPNGITIPGISSDVPESAHKTTASEAKSDTGQPTKVGRFQVTTTANKVGRFSVSKTEDKITDTKKEGPVASPPFMDLEQAVLPAVIPKKEKPELSEPSHLNGPSSDPEAAFLSRDVDDGSGSPHSPHQLSSKSLPSQNLSQSLSNSFNSSYMSSDNESDIEDEDLKLELRRLRDKHLKEIQDLQSRQKHEIESLYTKLGKVPPAVIIPPAAPLSGRRRRPTKSKGSKSSRSSSLGNKSPQLSGNLSGQSAASVLHPQQTLHPPGNIPESGQNQLLQPLKPSPSSDNLYSAFTSDGAISVPSLSAPGQGIKQPSSSKNNKMEMLPYLGQKPVKAGWETS

SEQ ID NO: 111 - DNA, 2865 bp, Homo Sapiens
  CDS (1)...(2865)
atgtctggcggcgccgcagagaagcagagcagcactcccggttccctgttcctctcgccgccggctcctgcccccaagaatggctccagctccgattcctccgtgggggagaaactgggagccgcggccgccgacgctgtgaccggcaggaccgaggagtacaggcgccgccgccacactatggacaaggacagccgtggggcggccgcgaccactaccaccactgagcaccgcttcttccgccggagcgtcatctgcgactccaatgccactgcactggagcttcccggccttcctctttccctgccccagcccagcatccccgcggctgtcccgcagagtgctccaccggagccccaccgggaagagaccgtgaccgccaccgccacttcccaggtagcccagcagcctccagccgctgccgcccctggggaacaggccgtcgcgggccctgccccctcgactgtccccagcagtaccagcaaagaccgcccagtgtcccagcctagccttgtggggagcaaagaggagccgccgccggcgagaagtggcagcggcggcggcagcgccaaggagccacaggaggaacggagccagcagcaggatgatatcgaagagctggagaccaaggccgtgggaatgtctaacgatggccgctttctcaagtttgacatcgaaatcggcagaggctcctttaagacggtctacaaaggtctggacactgaaaccaccgtggaagtcgcctggtgtgaactgcaggatcgaaaattaacaaagtctgagaggcagagatttaaagaagaagctgaaatgttaaaaggtcttcagcatcccaatattgttagattttatgattcctgggaatccacagtaaaaggaaagaagtgcattgttttggtgactgaacttatgacgtctggaacacttaaaacgtatctgaaaaggtttaaagtgatgaagatcaaagttctaagaagctggtgccgtcagatccttaaaggtcttcagtttcttcatactcgaactccacctatcattcaccgcgatcttaaatgtgacaacatctttatcaccggccctactggctcagtcaagattggagacctcggtctggcaaccctgaagcgggcttcttttgccaagagtgtgataggtaccccagagttcatggcccctgagatgtatgaggagaaatatgatgaatccgttgacgtttatgcttttgggatgtgcatgcttgagatggctacatctgaatatccttactcggagtgccaaaatgctgcacagatctaccgtcgcgtgaccagtggggtgaagccagccagttttgacaaagtagcaattcctgaagtgaaggaaattattgaaggatgcatacgacaaaacaaagatgaaagatattccatcaaagaccttttgaaccatgccttcttccaagaggaaacaggagtacgggtagaattagcagaagaagatgatggagaaaaaatagccataaaattatggctacgtattgaagatattaagaaattaaagggaaaatacaaagataatgaagctattgagttttcttttgatttagagagagatgtcccagaagatgttgcacaagaaatggtagagtctgggtatgtctgtgaaggtgatcacaagaccatggctaaagctatcaaagacagagtatcattaattaagaggaaacgagagcagcggcagttggtacgggaggagcaagaaaaaaaaaagcaggaagagagcagtctcaaacagcaggtagaacaatccagtgcttcccagacaggaatcaagcagctcccttctgctagcaccggcatacctactgcttctaccacttcagcttcagtttctacacaagtagaacctgaagaacctgaggcagatcaacatcaacaactacagtaccagcaacccagtatatctgtgttatctgatgggacggttgacagtggtcagggatcctctgtcttcacagaatctcgagtgagcagccaacagacagtttcatatggttcccaacatgaacaggcacattctacaggcacagtcccagggcatataccttctactgtccaagcacagtctcagccccatggggtatatccaccctcaagtgtgcagcagggaatacagcagacagcccctcctcaacagacagtgcagtattcactttcacagacatcaacctccagtgaggccactactgcacagccagtgagtcagcctcaagctccacaagtcttgcctcaagtatcagctggaaaacagcttccagtttcccagccagtaccaactatccaaggcgaacctcagatcccagttgcgacacaaccctcggttgttccagtccactctggtgctcatttccttccagtgggacagccgctccctactcccttgctccctcagtaccctgtctctcagattcccatatcaactcctcatgtgtctacggctcagacaggtttctcatcccttcccatcacaatggcagctggcattactcagcctctgctcacgttggcttcatctgctacaacagctgcgatcccgggggtatcaactgtggttcctagtcagcttccaacccttctgcagcctgtgactcagctgccaagtcaggttcacccacagctcctacaaccagcagttcagtccatgggaataccagctaaccttggacaagctgctgaggttccactttcctctggagatgttctgtaccagggcttcccacctcgactgccaccacagtacccaggagattcaaatattgctccctcttccaacgtggcttctgtttgcatccattctacagtcctawcccctataccttctgcataa

SEQ ID NO: 112 - protein, 954 aa, Homo Sapiens
  VARIANT 949: Xaa = Any Amino Acid
MSGGAAEKQSSTPGSLFLSPPAPAPKNGSSSDSSVGEKLGAAAADAVTGRTEEYRRRRHTMDKDSRGAAATTTTTEHRFFRRSVICDSNATALELPGLPLSLPQPSIPAAVPQSAPPEPHREETVTATATSQVAQQPPAAAAPGEQAVAGPAPSTVPSSTSKDRPVSQPSLVGSKEEPPPARSGSGGGSAKEPQEERSQQQDDIEELETKAVGMSNDGRFLKFDIEIGRGSFKTVYKGLDTETTVEVAWCELQDRKLTKSERQRFKEEAEMLKGLQHPNIVRFYDSWESTVKGKKCIVLVTELMTSGTLKTYLKRFKVMKIKVLRSWCRQILKGLQFLHTRTPPIIHRDLKCDNIFITGPTGSVKIGDLGLATLKRASFAKSVIGTPEFMAPEMYEEKYDESVDVYAFGMCMLEMATSEYPYSECQNAAQIYRRVTSGVKPASFDKVAIPEVKEIIEGCIRQNKDERYSIKDLLNHAFFQEETGVRVELAEEDDGEKIAIKLWLRIEDIKKLKGKYKDNEAIEFSFDLERDVPEDVAQEMVESGYVCEGDHKTMAKAIKDRVSLIKRKREQRQLVREEQEKKKQEESSLKQQVEQSSASQTGIKQLPSASTGIPTASTTSASVSTQVEPEEPEADQHQQLQYQQPSISVLSDGTVDSGQGSSVFTESRVSSQQTVSYGSQHEQAHSTGTVPGHIPSTVQAQSQPHGVYPPSSVQQGIQQTAPPQQTVQYSLSQTSTSSEATTAQPVSQPQAPQVLPQVSAGKQLPVSQPVPTIQGEPQIPVATQPSVVPVHSGAHFLPVGQPLPTPLLPQYPVSQIPISTPHVSTAQTGFSSLPITMAAGITQPLLTLASSATTAAIPGVSTVVPSQLPTLLQPVTQLPSQVHPQLLQPAVQSMGIPANLGQAAEVPLSSGDVLYQGFPPRLPPQYPGDSNIAPSSNVASVCIHSTVLXPIPSA

SEQ ID NO: 113 - DNA, 6606 bp, Homo Sapiens
  CDS (1)...(6606)
atgtctggcggcgccgcagagaagcagagcagcactcccggttccctgttcctctcgccgccggctcctgcccccaagaatggctccagctccgattcctccgtgggggagaaactgggagccgcggccgccgacgctgtgaccggcaggaccgaggagtacaggcgccgccgccacactatggacaaggacagccgtggggcggccgcgaccactaccaccactgagcaccgcttcttccgccggagcgtcatctgcgactccaatgccactgcactggagcttcccggccttcctctttccctgccccagcccagcatccccgcggctgtcccgcagagtgctccaccggagccccaccgggaagagaccgtgaccgccaccgccacttcccaggtagcccagcagcctccagccgctgccgcccctggggaacaggccgtcgcgggccctgccccctcgactgtccccagcagtaccagcaaagaccgcccagtgtcccagcctagccttgtggggagcaaagaggagccgccgccggcgagaagtggcagcggcggcggcagcgccaaggagccacaggaggaacggagccagcagcaggatgatatcgaagagctggagaccaaggccgtgggaatgtctaacgatggccgctttctcaagtttgacatcgaaatcggcagaggctcctttaagacggtctacaaaggtctggacactgaaaccaccgtggaagtcgcctggtgtgaactgcaggatcgaaaattaacaaagtctgagaggcagagatttaaagaagaagctgaaatgttaaaaggtcttcagcatcccaatattgttagattttatgattcctgggaatccacagtaaaaggaaagaagtgcattgttttggtgactgaacttatgacgtctggaacacttaaaacgtatctgaaaaggtttaaagtgatgaagatcaaagttctaagaagctggtgccgtcagatccttaaaggtcttcagtttcttcatactcgaactccacctatcattcaccgcgatcttaaatgtgacaacatctttatcaccggccctactggctcagtcaagattggagacctcggtctggcaaccctgaagcgggcttcttttgccaagagtgtgataggtaccccagagttcatggcccctgagatgtatgaggagaaatatgatgaatccgttgacgtttatgcttttgggatgtgcatgcttgagatggctacatctgaatatccttactcggagtgccaaaatgctgcacagatctaccgtcgcgtgaccagtggggtgaagccagccagttttgacaaagtagcaattcctgaagtgaaggaaattattgaaggatgcatacgacaaaacaaagatgaaagatattccatcaaagaccttttgaaccatgccttcttccaagaggaaacaggagtacgggtagaattagcagaagaagatgatggagaaaaaatagccataaaattatggctacgtattgaagatattaagaaattaaagggaaaatacaaagataatgaagctattgagttttcttttgatttagagagagatgtcccagaagatgttgcacaagaaatggtagagtctgggtatgtctgtgaaggtgatcacaagaccatggctaaagctatcaaagacagagtatcattaattaagaggaaacgagagcagcggcagttggtacgggaggagcaagaaaaaaaaaagcaggaagagagcagtctcaaacagcaggtagaacaatccagtgcttcccagacaggaatcaagcagctcccttctgctagcaccggcatacctactgcttctaccacttcagcttcagtttctacacaagtagaacctgaagaacctgaggcagatcaacatcaacaactacagtaccagcaacccagtatatctgtgttatctgatgggacggttgacagtggtcagggatcctctgtcttcacagaatctcgagtgagcagccaacagacagtttcatatggttcccaacatgaacaggcacattctacaggcacagtcccagggcatataccttctactgtccaagcacagtctcagccccatggggtatatccaccctcaagtgtgcagcagggaatacagcagacagcccctcctcaacagacagtgcagtattcactttcacagacatcaacctccagtgaggccactactgcacagccagtgagtcagcctcaagctccacaagtcttgcctcaagtatcagctggaaaacagggcttcccacctcgactgccaccacagtacccaggagattcaaatattgctccctcttccaacgtggcttctgtttgcatccattctacagtcctawcccctcccatgccgacagaagtactggctacacctgggtactttcccacagtggtgcagccttatgtggaatcaaatcttttagttcctatgggtggtgtaggaggacaggttcaagtgtcccagccaggagggagtttagcacaagcccccactacatcctcccagcaagcagttttggagagtactcagggagtctctcaggttgctcctgcagagccagttgcagtagcacagccccaagctacccagccgaccactttggcttcctctgtagacagtgcacattcagatgttgcttcaggtatgagtgatggcaatgagaacgtcccatcttccagtggaaggcatgaaggaagaactacaaaacggcattaccgaaaatctgtaaggagtcgctctcgacatgaaaaaacttcacgcccaaaattaagaattttgaatgtttcaaataaaggagaccgagtagtagaatgtcaattagagactcataataggaaaatggttacattcaaatttgacctagatggtgacaaccccgaggagatagcaacaattatggtgaacaatgactttattctagcaatagagagagagtcgtttgtggatcaagtgcgagaaattattgaaaaagctgatgaaatgctcagtgaggatgtcagtgtggaaccagagggtgatcagggattggagagtctacaaggaaaggatgactatggcttttcaggttctcagaaattggaaggagagttcaaacaaccaattcctgcgtcttccatgccacagcaaataggcattcctaccagttctttaactcaagttgttcattctgcgggaaggcggtttatagtgagtcctgtgccagaaagccgattacgagaatcaaaagttttccccagtgaaataacagatacagttgctgcctctacagctcagagccctggaatgaacttgtctcactctgcatcatcccttagtctacaacaggccttttctgaacttagacgtgcccaaatgacagaaggacccaayacagcacctccaaactttagtcatacaggaccaacatttccagtagtacctcctttcttaagtagcattgctggagtcccaaccacagcagcagccacagcaccagtccctgcaacaagcagccctcctaatgacatttccacatcagtaattcagtctgaggttacagtgcccactgaagaggggattgctggagttgccaccagcacaggtgtggtaacttcaggtggtctccccataccacctgtgtctgaatcaccagtactttccagcgtagtttcaagtatcacaatacctgcagttgtctcaatatctactacatccccgtcacttcaagtccccacatccacatctgagatcgttgtttctagtacagcactgtatccttcagtaacagtttcagcaacttcagcctctgcagggggcagtactgctaccccaggtcctaagcctccagctgtagtatctcagcaggcagcaggcagcactactgtgggagccacattaacatcagtttctaccaccacttcattcccaagcacagcttcacagctgtccattcagcttagcagcagtacttctactcctactttagctgaaaccgtggtagttagcgcacactcactagataagacatctcatagcagtacaactggattggctttctccctctctgcaccatcttcctcttcctctcctggagcaggagtgtctagttatatttctcagcctggtgggctgcatcctttggtcattccatcagtgatagcttctactcctattcttccccaagcagcaggacctacttctacacctttattaccccaagtacctagtatcccacccttggtacagcctgttgccaatgtgcctgctgtacagcagacactaattcatagtcagcctcaaccagctttgcttcccaaccagccccatactcattgtcctgaagtagattctgatacacaacccaaagctcctggaattgatgacataaagactctagaagaaaagctgcggtctctgttcagtgaacacagctcatctggagctcagcatgcctctgtctcactggagacctcactagtcatagagagcactgtcacaccaggcatcccaactactgctgttgcaccaagcaaactcctgacttctaccacaagtacttgcttaccaccaaccaatttaccactaggaacagttgctttgccagttacaccagtggtcacacctgggcaagtttctaccccagtcagcactactacatcaggagtgaaacctggaactgctccctccaagccacctctaactaaggctccggtgctgccagtgggtactgaacttccagcaggtactctacccagcgagcagctgccaccttttccaggaccttctctaacccagtcccagcaacctctagaggatcttgatgctcaattgagaagaacacttagtccagagatkatcacagtgacttctgcggttggtcctgtgtccatggcggctccaacagcaatcacagaagcaggaacacagcctcagaagggtgtttctcaagtcaaagaaggccctgtcctagcaactagttcaggagctggtgtttttaagatgggacgatttcaggtttctgttgcagcagacggtgcccagaaagagggtaaaaataagtcagaagatgcaaagtctgttcattttgaatccagcacctcagagtcctcagtgctatcaagtagtagtccagagagtaccttggtgaaaccagagccgaatggcataaccatccctggtatctcttcagatgtgccagagagtgcccacaaaactactgcctcagaggcaaagtcagacactgggcagcctaccaaggttggacgttttcaggtgacaactacagcaaacaaagtgggtcgtttctctgtatcaaaaactgaggacaagatcactgacacaaagaaagaaggaccagtggcatctcctccttttatggatttggaacaagctgttcttcctgctgtgataccaaagaaagagaagcctgaactgtcagagccttcacatctaaatgggccgtcttctgacccggaggccgcttttttaagtagggatgtggatgatggttccggtagtccacactcgccccatcagctgagctcaaagagccttcctagccagaatctaagtcaaagccttagtaattcatttaactcctcttacatgagtagcgacaatgagtcagatatcgaagatgaagacttaaagttagagctgcgacgactacgagataaacatctcaaagagattcaggacctgcagagtcgccagaagcatgaaattgaatctttgtataccaaactgggcaaggtgccccctgctgttattattcccccagctgctcccctttcagggagaagacgacgacccactaaaagcaaaggcagcaaatctagtcgaagcagttccttggggaataaaagcccccagctttcaggtaacctgtctggtcagagtgcagcttcagtcttgcacccccagcagaccctccaccctcctggcaacatcccagagtccgggcagaatcagctgttacagccccttaagccatctccctccagtgacaacctctattcagccttcaccagtgatggtgccatttcagtaccaagcctttctgctccaggtcaaggaaccagcagcacaaacactgttggggcaacagtgaacagccaagccgcccaagctcagcctcctgccatgacgtccagcaggaagggcacattcacagatgacttgcacaagttggtagacaattgggcccgagatgccatgaatctctcaggcaggagaggaagcaaagggcacatgaattatgagggccctggaatggcaaggaagttctctgcacctgggcaactgtgcatctccatgacctcgaacctgggtggctctgcccccatctctgcagcatcagctacctctctaggtcacttcaccaagtctatgtgccccccacagcagtatggctttccagctaccccatttggcgctcaatggagtgggacgggtggcccagcaccacagccacttggccagttccaacctgtgggaactgcctccttgcagaatttcaacatcagcaatttgcagaaatccatcagcaaccccccaggctccaacctgcggaccacttag

SEQ ID NO: 114 - protein, 2201 aa, Homo Sapiens
  VARIANT 796, 1627: Xaa = Any Amino Acid
MSGGAAEKQSSTPGSLFLSPPAPAPKNGSSSDSSVGEKLGAAAADAVTGRTEEYRRRRHTMDKDSRGAAATTTTTEHRFFRRSVICDSNATALELPGLPLSLPQPSIPAAVPQSAPPEPHREETVTATATSQVAQQPPAAAAPGEQAVAGPAPSTVPSSTSKDRPVSQPSLVGSKEEPPPARSGSGGGSAKEPQEERSQQQDDIEELETKAVGMSNDGRFLKFDIEIGRGSFKTVYKGLDTETTVEVAWCELQDRKLTKSERQRFKEEAEMLKGLQHPNIVRFYDSWESTVKGKKCIVLVTELMTSGTLKTYLKRFKVMKIKVLRSWCRQILKGLQFLHTRTPPIIHRDLKCDNIFITGPTGSVKIGDLGLATLKRASFAKSVIGTPEFMAPEMYEEKYDESVDVYAFGMCMLEMATSEYPYSECQNAAQIYRRVTSGVKPASFDKVAIPEVKEIIEGCIRQNKDERYSIKDLLNHAFFQEETGVRVELAEEDDGEKIAIKLWLRIEDIKKLKGKYKDNEAIEFSFDLERDVPEDVAQEMVESGYVCEGDHKTMAKAIKDRVSLIKRKREQRQLVREEQEKKKQEESSLKQQVEQSSASQTGIKQLPSASTGIPTASTTSASVSTQVEPEEPEADQHQQLQYQQPSISVLSDGTVDSGQGSSVFTESRVSSQQTVSYGSQHEQAHSTGTVPGHIPSTVQAQSQPHGVYPPSSVQQGIQQTAPPQQTVQYSLSQTSTSSEATTAQPVSQPQAPQVLPQVSAGKQGFPPRLPPQYPGDSNIAPSSNVASVCIHSTVLXPPMPTEVLATPGYFPTVVQPYVESNLLVPMGGVGGQVQVSQPGGSLAQAPTTSSQQAVLESTQGVSQVAPAEPVAVAQPQATQPTTLASSVDSAHSDVASGMSDGNENVPSSSGRHEGRTTKRHYRKSVRSRSRHEKTSRPKLRILNVSNKGDRVVECQLETHNRKMVTFKFDLDGDNPEEIATIMVNNDFILAIERESFVDQVREIIEKADEMLSEDVSVEPEGDQGLESLQGKDDYGFSGSQKLEGEFKQPIPASSMPQQIGIPTSSLTQVVHSAGRRFIVSPVPESRLRESKVFPSEITDTVAASTAQSPGMNLSHSASSLSLQQAFSELRRAQMTEGPNTAPPNFSHTGPTFPVVPPFLSSIAGVPTTAAATAPVPATSSPPNDISTSVIQSEVTVPTEEGIAGVATSTGVVTSGGLPIPPVSESPVLSSVVSSITIPAVVSISTTSPSLQVPTSTSEIVVSSTALYPSVTVSATSASAGGSTATPGPKPPAVVSQQAAGSTTVGATLTSVSTTTSFPSTASQLSIQLSSSTSTPTLAETVVVSAHSLDKTSHSSTTGLAFSLSAPSSSSSPGAGVSSYISQPGGLHPLVIPSVIASTPILPQAAGPTSTPLLPQVPSIPPLVQPVANVPAVQQTLIHSQPQPALLPNQPHTHCPEVDSDTQPKAPGIDDIKTLEEKLRSLFSEHSSSGAQHASVSLETSLVIESTVTPGIPTTAVAPSKLLTSTTSTCLPPTNLPLGTVALPVTPVVTPGQVSTPVSTTTSGVKPGTAPSKPPLTKAPVLPVGTELPAGTLPSEQLPPFPGPSLTQSQQPLEDLDAQLRRTLSPEXITVTSAVGPVSMAAPTAITEAGTQPQKGVSQVKEGPVLATSSGAGVFKMGRFQVSVAADGAQKEGKNKSEDAKSVHFESSTSESSVLSSSSPESTLVKPEPNGITIPGISSDVPESAHKTTASEAKSDTGQPTKVGRFQVTTTANKVGRFSVSKTEDKITDTKKEGPVASPPFMDLEQAVLPAVIPKKEKPELSEPSHLNGPSSDPEAAFLSRDVDDGSGSPHSPHQLSSKSLPSQNLSQSLSNSFNSSYMSSDNESDIEDEDLKLELRRLRDKHLKEIQDLQSRQKHEIESLYTKLGKVPPAVIIPPAAPLSGRRRRPTKSKGSKSSRSSSLGNKSPQLSGNLSGQSAASVLHPQQTLHPPGNIPESGQNQLLQPLKPSPSSDNLYSAFTSDGAISVPSLSAPGQGTSSTNTVGATVNSQAAQAQPPAMTSSRKGTFTDDLHKLVDNWARDAMNLSGRRGSKGHMNYEGPGMARKFSAPGQLCISMTSNLGGSAPISAASATSLGHFTKSMCPPQQYGFPATPFGAQWSGTGGPAPQPLGQFQPVGTASLQNFNISNLQKSISNPPGSNLRTT

SEQ ID NO: 115 - DNA, 6195 bp, Homo Sapiens
  CDS (1)...(6195)
atgtctggcggcgccgcagagaagcagagcagcactcccggttccctgttcctctcgccgccggctcctgcccccaagaatggctccagctccgattcctccgtgggggagaaactgggagccgcggccgccgacgctgtgaccggcaggaccgaggagtacaggcgccgccgccacactatggacaaggacagccgtggggcggccgcgaccactaccaccactgagcaccgcttcttccgccggagcgtcatctgcgactccaatgccactgcactggagcttcccggccttcctctttccctgccccagcccagcatccccgcggctgtcccgcagagtgctccaccggagccccaccgggaagagaccgtgaccgccaccgccacttcccaggtagcccagcagcctccagccgctgccgcccctggggaacaggccgtcgcgggccctgccccctcgactgtccccagcagtaccagcaaagaccgcccagtgtcccagcctagccttgtggggagcaaagaggagccgccgccggcgagaagtggcagcggcggcggcagcgccaaggagccacaggaggaacggagccagcagcaggatgatatcgaagagctggagaccaaggccgtgggaatgtctaacgatggccgctttctcaagtttgacatcgaaatcggcagaggctcctttaagacggtctacaaaggtctggacactgaaaccaccgtggaagtcgcctggtgtgaactgcaggatcgaaaattaacaaagtctgagaggcagagatttaaagaagaagctgaaatgttaaaaggtcttcagcatcccaatattgttagattttatgattcctgggaatccacagtaaaaggaaagaagtgcattgttttggtgactgaacttatgacgtctggaacacttaaaacgtatctgaaaaggtttaaagtgatgaagatcaaagttctaagaagctggtgccgtcagatccttaaaggtcttcagtttcttcatactcgaactccacctatcattcaccgcgatcttaaatgtgacaacatctttatcaccggccctactggctcagtcaagattggagacctcggtctggcaaccctgaagcgggcttcttttgccaagagtgtgataggtaccccagagttcatggcccctgagatgtatgaggagaaatatgatgaatccgttgacgtttatgcttttgggatgtgcatgcttgagatggctacatctgaatatccttactcggagtgccaaaatgctgcacagatctaccgtcgcgtgaccagtggggtgaagccagccagttttgacaaagtagcaattcctgaagtgaaggaaattattgaaggatgcatacgacaaaacaaagatgaaagatattccatcaaagaccttttgaaccatgccttcttccaagaggaaacaggagtacgggtagaattagcagaagaagatgatggagaaaaaatagccataaaattatggctacgtattgaagatattaagaaattaaagggaaaatacaaagataatgaagctattgagttttcttttgatttagagagagatgtcccagaagatgttgcacaagaaatggtagagtctgggtatgtctgtgaaggtgatcacaagaccatggctaaagctatcaaagacagagtatcattaattaagaggaaacgagagcagcggcagttggtacgggaggagcaagaaaaaaaaaagcaggaagagagcagtctcaaacagcaggtagaacaatccagtgcttcccagacaggaatcaagcagctcccttctgctagcaccggcatacctactgcttctaccacttcagcttcagtttctacacaagtagaacctgaagaacctgaggcagatcaacatcaacaactacagtaccagcaacccagtatatctgtgttatctgatgggacggttgacagtggtcagggatcctctgtcttcacagaatctcgagtgagcagccaacagacagtttcatatggttcccaacatgaacaggcacattctacaggcacagtcccagggcatataccttctactgtccaagcacagtctcagccccatggggtatatccaccctcaagtgtgcagcagggaatacagcagacagcccctcctcaacagacagtgcagtattcactttcacagacatcaacctccagtgaggccactactgcacagccagtgagtcagcctcaagctccacaagtcttgcctcaagtatcagctggaaaacagggcttcccacctcgactgccaccacagtacccaggagattcaaatattgctccctcttccaacgtggcttctgtttgcatccattctacagtcctawcccctcccatgccgacagaagtactggctacacctgggtactttcccacagtggtgcagccttatgtggaatcaaatcttttagttcctatgggtggtgtaggaggacaggttcaagtgtcccagccaggagggagtttagcacaagcccccactacatcctcccagcaagcagttttggagagtactcagggagtctctcaggttgctcctgcagagccagttgcagtagcacagccccaagctacccagccgaccactttggcttcctctgtagacagtgcacattcagatgttgcttcaggtatgagtgatggcaatgagaacgtcccatcttccagtggaaggcatgaaggaagaactacaaaacggcattaccgaaaatctgtaaggagtcgctctcgacatgaaaaaacttcacgcccaaaattaagaattttgaatgtttcaaataaaggagaccgagtagtagaatgtcaattagagactcataataggaaaatggttacattcaaatttgacctagatggtgacaaccccgaggagatagcaacaattatggtgaacaatgactttattctagcaatagagagagagtcgtttgtggatcaagtgcgagaaattattgaaaaagctgatgaaatgctcagtgaggatgtcagtgtggaaccagagggtgatcagggattggagagtctacaaggaaaggatgactatggcttttcaggttctcagaaattggaaggagagttcaaacaaccaattcctgcgtcttccatgccacagcaaataggcattcctaccagttctttaactcaagttgttcattctgcgggaaggcggtttatagtgagtcctgtgccagaaagccgattacgagaatcaaaagttttccccagtgaaataacagatacagttgctgcctctacagctcagagccctggaatgaacttgtctcactctgcatcatcccttagtctacaacaggccttttctgaacttagacgtgcccaaatgacagaaggacccaayacagcacctccaaactttagtcatacaggaccaacatttccagtagtacctcctttcttaagtagcattgctggagtcccaaccacagcagcagccacagcaccagtccctgcaacaagcagccctcctaatgacatttccacatcagtaattcagtctgaggttacagtgcccactgaagaggggattgctggagttgccaccagcacaggtgtggtaacttcaggtggtctccccataccacctgtgtctgaatcaccagtactttccagcgtagtttcaagtatcacaatacctgcagttgtctcaatatctactacatccccgtcacttcaagtccccacatccacatctgagatcgttgtttctagtacagcactgtatccttcagtaacagtttcagcaacttcagcctctgcagggggcagtactgctaccccaggtcctaagcctccagctgtagtatctcagcaggcagcaggcagcactactgtgggagccacattaacatcagtttctaccaccacttcattcccaagcacagcttcacagctgtccattcagcttagcagcagtacttctactcctactttagctgaaaccgtggtagttagcgcacactcactagataagacatctcatagcagtacaactggattggctttctccctctctgcaccatcttcctcttcctctcctggagcaggagtgtctagttatatttctcagcctggtgggctgcatcctttggtcattccatcagtgatagcttctactcctattcttccccaagcagcaggacctacttctacacctttattaccccaagtacctagtatcccacccttggtacagcctgttgccaatgtgcctgctgtacagcagacactaattcatagtcagcctcaaccagctttgcttcccaaccagccccatactcattgtcctgaagtagattctgatacacaacccaaagctcctggaattgatgacataaagactctagaagaaaagctgcggtctctgttcagtgaacacagctcatctggagctcagcatgcctctgtctcactggagacctcactagtcatagagagcactgtcacaccaggcatcccaactactgctgttgcaccaagcaaactcctgacttctaccacaagtacttgcttaccaccaaccaatttaccactaggaacagttgctttgccagttacaccagtggtcacacctgggcaagtttctaccccagtcagcactactacatcaggagtgaaacctggaactgctccctccaagccacctctaactaaggctccggtgctgccagtgggtactgaacttccagcaggtactctacccagcgagcagctgccaccttttccaggaccttctctaacccagtcccagcaacctctagaggatcttgatgctcaattgagaagaacacttagtccagagatkatcacagtgacttctgcggttggtcctgtgtccatggcggctccaacagcaatcacagaagcaggaacacagcctcagaagggtgtttctcaagtcaaagaaggccctgtcctagcaactagttcaggagctggtgtttttaagatgggacgatttcaggtttctgttgcagcagacggtgcccagaaagagggtaaaaataagtcagaagatgcaaagtctgttcattttgaatccagcacctcagagtcctcagtgctatcaagtagtagtccagagagtaccttggtgaaaccagagccgaatggcataaccatccctggtatctcttcagatgtgccagagagtgcccacaaaactactgcctcagaggcaaagtcagacactgggcagcctaccaaggttggacgttttcaggtgacaactacagcaaacaaagtgggtcgtttctctgtatcaaaaactgaggacaagatcactgacacaaagaaagaaggaccagtggcatctcctccttttatggatttggaacaagctgttcttcctgctgtgataccaaagaaagagaagcctgaactgtcagagccttcacatctaaatgggccgtcttctgacccggaggccgcttttttaagtagggatgtggatgatggttccggtagtccacactcgccccatcagctgagctcaaagagccttcctagccagaatctaagtcaaagccttagtaattcatttaactcctcttacatgagtagcgacaatgagtcagatatcgaagatgaagacttaaagttagagctgcgacgactacgagataaacatctcaaagagattcaggacctgcagagtcgccagaagcatgaaattgaatctttgtataccaaactgggcaaggtgccccctgctgttattattcccccagctgctcccctttcagggagaagacgacgacccactaaaagcaaaggcagcaaatctagtcgaagcagttccttggggaataaaagcccccagctttcaggtaacctgtctggtcagagtgcagcttcagtcttgcacccccagcagaccctccaccctcctggcaacatcccagagtccgggcagaatcagctgttacagccccttaagccatctccctccagtgacaacctctattcagccttcaccagtgatggtgccatttcagtaccaagcctttctgctccaggtcaaggaataaagcaaccatcatcgtccaaaaacaataaaatggagatgttgccatacctgggacaaaagcctgttaaggcgggttgggagactagctga

SEQ ID NO: 116 - protein, 2064 aa, Homo Sapiens
  VARIANT 796, 1627: Xaa = Any Amino Acid
MSGGAAEKQSSTPGSLFLSPPAPAPKNGSSSDSSVGEKLGAAAADAVTGRTEEYRRRRHTMDKDSRGAAATTTTTEHRFFRRSVICDSNATALELPGLPLSLPQPSIPAAVPQSAPPEPHREETVTATATSQVAQQPPAAAAPGEQAVAGPAPSTVPSSTSKDRPVSQPSLVGSKEEPPPARSGSGGGSAKEPQEERSQQQDDIEELETKAVGMSNDGRFLKFDIEIGRGSFKTVYKGLDTETTVEVAWCELQDRKLTKSERQRFKEEAEMLKGLQHPNIVRFYDSWESTVKGKKCIVLVTELMTSGTLKTYLKRFKVMKIKVLRSWCRQILKGLQFLHTRTPPIIHRDLKCDNIFITGPTGSVKIGDLGLATLKRASFAKSVIGTPEFMAPEMYEEKYDESVDVYAFGMCMLEMATSEYPYSECQNAAQIYRRVTSGVKPASFDKVAIPEVKEIIEGCIRQNKDERYSIKDLLNHAFFQEETGVRVELAEEDDGEKIAIKLWLRIEDIKKLKGKYKDNEAIEFSFDLERDVPEDVAQEMVESGYVCEGDHKTMAKAIKDRVSLIKRKREQRQLVREEQEKKKQEESSLKQQVEQSSASQTGIKQLPSASTGIPTASTTSASVSTQVEPEEPEADQHQQLQYQQPSISVLSDGTVDSGQGSSVFTESRVSSQQTVSYGSQHEQAHSTGTVPGHIPSTVQAQSQPHGVYPPSSVQQGIQQTAPPQQTVQYSLSQTSTSSEATTAQPVSQPQAPQVLPQVSAGKQGFPPRLPPQYPGDSNIAPSSNVASVCIHSTVLXPPMPTEVLATPGYFPTVVQPYVESNLLVPMGGVGGQVQVSQPGGSLAQAPTTSSQQAVLESTQGVSQVAPAEPVAVAQPQATQPTTLASSVDSAHSDVASGMSDGNENVPSSSGRHEGRTTKRHYRKSVRSRSRHEKTSRPKLRILNVSNKGDRVVECQLETHNRKMVTFKFDLDGDNPEEIATIMVNNDFILAIERESFVDQVREIIEKADEMLSEDVSVEPEGDQGLESLQGKDDYGFSGSQKLEGEFKQPIPASSMPQQIGIPTSSLTQVVHSAGRRFIVSPVPESRLRESKVFPSEITDTVAASTAQSPGMNLSHSASSLSLQQAFSELRRAQMTEGPNTAPPNFSHTGPTFPVVPPFLSSIAGVPTTAAATAPVPATSSPPNDISTSVIQSEVTVPTEEGIAGVATSTGVVTSGGLPIPPVSESPVLSSVVSSITIPAVVSISTTSPSLQVPTSTSEIVVSSTALYPSVTVSATSASAGGSTATPGPKPPAVVSQQAAGSTTVGATLTSVSTTTSFPSTASQLSIQLSSSTSTPTLAETVVVSAHSLDKTSHSSTTGLAFSLSAPSSSSSPGAGVSSYISQPGGLHPLVIPSVIASTPILPQAAGPTSTPLLPQVPSIPPLVQPVANVPAVQQTLIHSQPQPALLPNQPHTHCPEVDSDTQPKAPGIDDIKTLEEKLRSLFSEHSSSGAQHASVSLETSLVIESTVTPGIPTTAVAPSKLLTSTTSTCLPPTNLPLGTVALPVTPVVTPGQVSTPVSTTTSGVKPGTAPSKPPLTKAPVLPVGTELPAGTLPSEQLPPFPGPSLTQSQQPLEDLDAQLRRTLSPEXITVTSAVGPVSMAAPTAITEAGTQPQKGVSQVKEGPVLATSSGAGVFKMGRFQVSVAADGAQKEGKNKSEDAKSVHFESSTSESSVLSSSSPESTLVKPEPNGITIPGISSDVPESAHKTTASEAKSDTGQPTKVGRFQVTTTANKVGRFSVSKTEDKITDTKKEGPVASPPFMDLEQAVLPAVIPKKEKPELSEPSHLNGPSSDPEAAFLSRDVDDGSGSPHSPHQLSSKSLPSQNLSQSLSNSFNSSYMSSDNESDIEDEDLKLELRRLRDKHLKEIQDLQSRQKHEIESLYTKLGKVPPAVIIPPAAPLSGRRRRPTKSKGSKSSRSSSLGNKSPQLSGNLSGQSAASVLHPQQTLHPPGNIPESGQNQLLQPLKPSPSSDNLYSAFTSDGAISVPSLSAPGQGIKQPSSSKNNKMEMLPYLGQKPVKAGWETS

SEQ ID NO: 117 - DNA, 2406 bp, Homo Sapiens
  CDS (1)...(2406)
atgtctggcggcgccgcagagaagcagagcagcactcccggttccctgttcctctcgccgccggctcctgcccccaagaatggctccagctccgattcctccgtgggggagaaactgggagccgcggccgccgacgctgtgaccggcaggaccgaggagtacaggcgccgccgccacactatggacaaggacagccgtggggcggccgcgaccactaccaccactgagcaccgcttcttccgccggagcgtcatctgcgactccaatgccactgcactggagcttcccggccttcctctttccctgccccagcccagcatccccgcggctgtcccgcagagtgctccaccggagccccaccgggaagagaccgtgaccgccaccgccacttcccaggtagcccagcagcctccagccgctgccgcccctggggaacaggccgtcgcgggccctgccccctcgactgtccccagcagtaccagcaaagaccgcccagtgtcccagcctagccttgtggggagcaaagaggagccgccgccggcgagaagtggcagcggcggcggcagcgccaaggagccacaggaggaacggagccagcagcaggatgatatcgaagagctggagaccaaggccgtgggaatgtctaacgatggccgctttctcaagtttgacatcgaaatcggcagaggctcctttaagacggtctacaaaggtctggacactgaaaccaccgtggaagtcgcctggtgtgaactgcaggatcgaaaattaacaaagtctgagaggcagagatttaaagaagaagctgaaatgttaaaaggtcttcagcatcccaatattgttagattttatgattcctgggaatccacagtaaaaggaaagaagtgcattgttttggtgactgaacttatgacgtctggaacacttaaaacgtatctgaaaaggtttaaagtgatgaagatcaaagttctaagaagctggtgccgtcagatccttaaaggtcttcagtttcttcatactcgaactccacctatcattcaccgcgatcttaaatgtgacaacatctttatcaccggccctactggctcagtcaagattggagacctcggtctggcaaccctgaagcgggcttcttttgccaagagtgtgataggtaccccagagttcatggcccctgagatgtatgaggagaaatatgatgaatccgttgacgtttatgcttttgggatgtgcatgcttgagatggctacatctgaatatccttactcggagtgccaaaatgctgcacagatctaccgtcgcgtgaccagtggggtgaagccagccagttttgacaaagtagcaattcctgaagtgaaggaaattattgaaggatgcatacgacaaaacaaagatgaaagatattccatcaaagaccttttgaaccatgccttcttccaagaggaaacaggagtacgggtagaattagcagaagaagatgatggagaaaaaatagccataaaattatggctacgtattgaagatattaagaaattaaagggaaaatacaaagataatgaagctattgagttttcttttgatttagagagagatgtcccagaagatgttgcacaagaaatggtagagtctgggtatgtctgtgaaggtgatcacaagaccatggctaaagctatcaaagacagagtatcattaattaagaggaaacgagagcagcggcagttggtacgggaggagcaagaaaaaaaaaagcaggaagagagcagtctcaaacagcaggtagaacaatccagtgcttcccagacaggaatcaagcagctcccttctgctagcaccggcatacctactgcttctaccacttcagcttcagtttctacacaagtagaacctgaagaacctgaggcagatcaacatcaacaactacagtaccagcaacccagtatatctgtgttatctgatgggacggttgacagtggtcagggatcctctgtcttcacagaatctcgagtgagcagccaacagacagtttcatatggttcccaacatgaacaggcacattctacaggcacagtcccagggcatataccttctactgtccaagcacagtctcagccccatggggtatatccaccctcaagtgtgcagcagggaatacagcagacagcccctcctcaacagacagtgcagtattcactttcacagacatcaacctccagtgaggccactactgcacagccagtgagtcagcctcaagctccacaagtcttgcctcaagtatcagctggaaaacagggcttcccacctcgactgccaccacagtacccaggagattcaaatattgctccctcttccaacgtggcttctgtttgcatccattctacagtcctawcccctataccttctgcataa

SEQ ID NO: 118 - protein, 801 aa, Homo Sapiens
  VARIANT 796: Xaa = Any Amino Acid
MSGGAAEKQSSTPGSLFLSPPAPAPKNGSSSDSSVGEKLGAAAADAVTGRTEEYRRRRHTMDKDSRGAAATTTTTEHRFFRRSVICDSNATALELPGLPLSLPQPSIPAAVPQSAPPEPHREETVTATATSQVAQQPPAAAAPGEQAVAGPAPSTVPSSTSKDRPVSQPSLVGSKEEPPPARSGSGGGSAKEPQEERSQQQDDIEELETKAVGMSNDGRFLKFDIEIGRGSFKTVYKGLDTETTVEVAWCELQDRKLTKSERQRFKEEAEMLKGLQHPNIVRFYDSWESTVKGKKCIVLVTELMTSGTLKTYLKRFKVMKIKVLRSWCRQILKGLQFLHTRTPPIIHRDLKCDNIFITGPTGSVKIGDLGLATLKRASFAKSVIGTPEFMAPEMYEEKYDESVDVYAFGMCMLEMATSEYPYSECQNAAQIYRRVTSGVKPASFDKVAIPEVKEIIEGCIRQNKDERYSIKDLLNHAFFQEETGVRVELAEEDDGEKIAIKLWLRIEDIKKLKGKYKDNEAIEFSFDLERDVPEDVAQEMVESGYVCEGDHKTMAKAIKDRVSLIKRKREQRQLVREEQEKKKQEESSLKQQVEQSSASQTGIKQLPSASTGIPTASTTSASVSTQVEPEEPEADQHQQLQYQQPSISVLSDGTVDSGQGSSVFTESRVSSQQTVSYGSQHEQAHSTGTVPGHIPSTVQAQSQPHGVYPPSSVQQGIQQTAPPQQTVQYSLSQTSTSSEATTAQPVSQPQAPQVLPQVSAGKQGFPPRLPPQYPGDSNIAPSSNVASVCIHSTVLXPIPSA

SEQ ID NO: 119 - DNA, 6327 bp, Homo Sapiens
  CDS (1)...(6327)
atgtctggcggcgccgcagagaagcagagcagcactcccggttccctgttcctctcgccgccggctcctgcccccaagaatggctccagctccgattcctccgtgggggagaaactgggagccgcggccgccgacgctgtgaccggcaggaccgaggagtacaggcgccgccgccacactatggacaaggacagccgtggggcggccgcgaccactaccaccactgagcaccgcttcttccgccggagcgtcatctgcgactccaatgccactgcactggagcttcccggccttcctctttccctgccccagcccagcatccccgcggctgtcccgcagagtgctccaccggagccccaccgggaagagaccgtgaccgccaccgccacttcccaggtagcccagcagcctccagccgctgccgcccctggggaacaggccgtcgcgggccctgccccctcgactgtccccagcagtaccagcaaagaccgcccagtgtcccagcctagccttgtggggagcaaagaggagccgccgccggcgagaagtggcagcggcggcggcagcgccaaggagccacaggaggaacggagccagcagcaggatgatatcgaagagctggagaccaaggccgtgggaatgtctaacgatggccgctttctcaagtttgacatcgaaatcggcagaggctcctttaagacggtctacaaaggtctggacactgaaaccaccgtggaagtcgcctggtgtgaactgcaggatcgaaaattaacaaagtctgagaggcagagatttaaagaagaagctgaaatgttaaaaggtcttcagcatcccaatattgttagattttatgattcctgggaatccacagtaaaaggaaagaagtgcattgttttggtgactgaacttatgacgtctggaacacttaaaacgtatctgaaaaggtttaaagtgatgaagatcaaagttctaagaagctggtgccgtcagatccttaaaggtcttcagtttcttcatactcgaactccacctatcattcaccgcgatcttaaatgtgacaacatctttatcaccggccctactggctcagtcaagattggagacctcggtctggcaaccctgaagcgggcttcttttgccaagagtgtgataggtaccccagagttcatggcccctgagatgtatgaggagaaatatgatgaatccgttgacgtttatgcttttgggatgtgcatgcttgagatggctacatctgaatatccttactcggagtgccaaaatgctgcacagatctaccgtcgcgtgaccagtggggtgaagccagccagttttgacaaagtagcaattcctgaagtgaaggaaattattgaaggatgcatacgacaaaacaaagatgaaagatattccatcaaagaccttttgaaccatgccttcttccaagaggaaacaggagtacgggtagaattagcagaagaagatgatggagaaaaaatagccataaaattatggctacgtattgaagatattaagaaattaaagggaaaatacaaagataatgaagctattgagttttcttttgatttagagagagatgtcccagaagatgttgcacaagaaatggtagagtctgggtatgtctgtgaaggtgatcacaagaccatggctaaagctatcaaagacagagtatcattaattaagaggaaacgagagcagcggcagttggtacgggaggagcaagaaaaaaaaaagcaggaagagagcagtctcaaacagcaggtagaacaatccagtgcttcccagacaggaatcaagcagctcccttctgctagcaccggcatacctactgcttctaccacttcagcttcagtttctacacaagtagaacctgaagaacctgaggcagatcaacatcaacaactacagtaccagcaacccagtatatctgtgttatctgatgggacggttgacagtggtcagggatcctctgtcttcacagaatctcgagtgagcagccaacagacagtttcatatggttcccaacatgaacaggcacattctacaggcacagtcccagggcatataccttctactgtccaagcacagtctcagccccatggggtatatccaccctcaagtgtgcagcagggaatacagcagacagcccctcctcaacagacagtgcagtattcactttcacagacatcaacctccagtgaggccactactgcacagccagtgagtcagcctcaagctccacaagtcttgcctcaagtatcagctggaaaacagagtactcagggagtctctcaggttgctcctgcagagccagttgcagtagcacagccccaagctacccagccgaccactttggcttcctctgtagacagtgcacattcagatgttgcttcaggtatgagtgatggcaatgagaacgtcccatcttccagtggaaggcatgaaggaagaactacaaaacggcattaccgaaaatctgtaaggagtcgctctcgacatgaaaaaacttcacgcccaaaattaagaattttgaatgtttcaaataaaggagaccgagtagtagaatgtcaattagagactcataataggaaaatggttacattcaaatttgacctagatggtgacaaccccgaggagatagcaacaattatggtgaacaatgactttattctagcaatagagagagagtcgtttgtggatcaagtgcgagaaattattgaaaaagctgatgaaatgctcagtgaggatgtcagtgtggaaccagagggtgatcagggattggagagtctacaaggaaaggatgactatggcttttcaggttctcagaaattggaaggagagttcaaacaaccaattcctgcgtcttccatgccacagcaaataggcattcctaccagttctttaactcaagttgttcattctgcgggaaggcggtttatagtgagtcctgtgccagaaagccgattacgagaatcaaaagttttccccagtgaaataacagatacagttgctgcctctacagctcagagccctggaatgaacttgtctcactctgcatcatcccttagtctacaacaggccttttctgaacttagacgtgcccaaatgacagaaggacccaayacagcacctccaaactttagtcatacaggaccaacatttccagtagtacctcctttcttaagtagcattgctggagtcccaaccacagcagcagccacagcaccagtccctgcaacaagcagccctcctaatgacatttccacatcagtaattcagtctgaggttacagtgcccactgaagaggggattgctggagttgccaccagcacaggtgtggtaacttcaggtggtctccccataccacctgtgtctgaatcaccagtactttccagcgtagtttcaagtatcacaatacctgcagttgtctcaatatctactacatccccgtcacttcaagtccccacatccacatctgagatcgttgtttctagtacagcactgtatccttcagtaacagtttcagcaacttcagcctctgcagggggcagtactgctaccccaggtcctaagcctccagctgtagtatctcagcaggcagcaggcagcactactgtgggagccacattaacatcagtttctaccaccacttcattcccaagcacagcttcacagctgtccattcagcttagcagcagtacttctactcctactttagctgaaaccgtggtagttagcgcacactcactagataagacatctcatagcagtacaactggattggctttctccctctctgcaccatcttcctcttcctctcctggagcaggagtgtctagttatatttctcagcctggtgggctgcatcctttggtcattccatcagtgatagcttctactcctattcttccccaagcagcaggacctacttctacacctttattaccccaagtacctagtatcccacccttggtacagcctgttgccaatgtgcctgctgtacagcagacactaattcatagtcagcctcaaccagctttgcttcccaaccagccccatactcattgtcctgaagtagattctgatacacaacccaaagctcctggaattgatgacataaagactctagaagaaaagctgcggtctctgttcagtgaacacagctcatctggagctcagcatgcctctgtctcactggagacctcactagtcatagagagcactgtcacaccaggcatcccaactactgctgttgcaccaagcaaactcctgacttctaccacaagtacttgcttaccaccaaccaatttaccactaggaacagttgctttgccagttacaccagtggtcacacctgggcaagtttctaccccagtcagcactactacatcaggagtgaaacctggaactgctccctccaagccacctctaactaaggctccggtgctgccagtgggtactgaacttccagcaggtactctacccagcgagcagctgccaccttttccaggaccttctctaacccagtcccagcaacctctagaggatcttgatgctcaattgagaagaacacttagtccagagatkatcacagtgacttctgcggttggtcctgtgtccatggcggctccaacagcaatcacagaagcaggaacacagcctcagaagggtgtttctcaagtcaaagaaggccctgtcctagcaactagttcaggagctggtgtttttaagatgggacgatttcaggtttctgttgcagcagacggtgcccagaaagagggtaaaaataagtcagaagatgcaaagtctgttcattttgaatccagcacctcagagtcctcagtgctatcaagtagtagtccagagagtaccttggtgaaaccagagccgaatggcataaccatccctggtatctcttcagatgtgccagagagtgcccacaaaactactgcctcagaggcaaagtcagacactgggcagcctaccaaggttggacgttttcaggtgacaactacagcaaacaaagtgggtcgtttctctgtatcaaaaactgaggacaagatcactgacacaaagaaagaaggaccagtggcatctcctccttttatggatttggaacaagctgttcttcctgctgtgataccaaagaaagagaagcctgaactgtcagagccttcacatctaaatgggccgtcttctgacccggaggccgcttttttaagtagggatgtggatgatggttccggtagtccacactcgccccatcagctgagctcaaagagccttcctagccagaatctaagtcaaagccttagtaattcatttaactcctcttacatgagtagcgacaatgagtcagatatcgaagatgaagacttaaagttagagctgcgacgactacgagataaacatctcaaagagattcaggacctgcagagtcgccagaagcatgaaattgaatctttgtataccaaactgggcaaggtgccccctgctgttattattcccccagctgctcccctttcagggagaagacgacgacccactaaaagcaaaggcagcaaatctagtcgaagcagttccttggggaataaaagcccccagctttcaggtaacctgtctggtcagagtgcagcttcagtcttgcacccccagcagaccctccaccctcctggcaacatcccagagtccgggcagaatcagctgttacagccccttaagccatctccctccagtgacaacctctattcagccttcaccagtgatggtgccatttcagtaccaagcctttctgctccaggtcaaggaaccagcagcacaaacactgttggggcaacagtgaacagccaagccgcccaagctcagcctcctgccatgacgtccagcaggaagggcacattcacagatgacttgcacaagttggtagacaattgggcccgagatgccatgaatctctcaggcaggagaggaagcaaagggcacatgaattatgagggccctggaatggcaaggaagttctctgcacctgggcaactgtgcatctccatgacctcgaacctgggtggctctgcccccatctctgcagcatcagctacctctctaggtcacttcaccaagtctatgtgccccccacagcagtatggctttccagctaccccatttggcgctcaatggagtgggacgggtggcccagcaccacagccacttggccagttccaacctgtgggaactgcctccttgcagaatttcaacatcagcaatttgcagaaatccatcagcaaccccccaggctccaacctgcggaccacttag

SEQ ID NO: 120 - protein, 2108 aa, Homo Sapiens
  VARIANT 1534: Xaa = Any Amino Acid
MSGGAAEKQSSTPGSLFLSPPAPAPKNGSSSDSSVGEKLGAAAADAVTGRTEEYRRRRHTMDKDSRGAAATTTTTEHRFFRRSVICDSNATALELPGLPLSLPQPSIPAAVPQSAPPEPHREETVTATATSQVAQQPPAAAAPGEQAVAGPAPSTVPSSTSKDRPVSQPSLVGSKEEPPPARSGSGGGSAKEPQEERSQQQDDIEELETKAVGMSNDGRFLKFDIEIGRGSFKTVYKGLDTETTVEVAWCELQDRKLTKSERQRFKEEAEMLKGLQHPNIVRFYDSWESTVKGKKCIVLVTELMTSGTLKTYLKRFKVMKIKVLRSWCRQILKGLQFLHTRTPPIIHRDLKCDNIFITGPTGSVKIGDLGLATLKRASFAKSVIGTPEFMAPEMYEEKYDESVDVYAFGMCMLEMATSEYPYSECQNAAQIYRRVTSGVKPASFDKVAIPEVKEIIEGCIRQNKDERYSIKDLLNHAFFQEETGVRVELAEEDDGEKIAIKLWLRIEDIKKLKGKYKDNEAIEFSFDLERDVPEDVAQEMVESGYVCEGDHKTMAKAIKDRVSLIKRKREQRQLVREEQEKKKQEESSLKQQVEQSSASQTGIKQLPSASTGIPTASTTSASVSTQVEPEEPEADQHQQLQYQQPSISVLSDGTVDSGQGSSVFTESRVSSQQTVSYGSQHEQAHSTGTVPGHIPSTVQAQSQPHGVYPPSSVQQGIQQTAPPQQTVQYSLSQTSTSSEATTAQPVSQPQAPQVLPQVSAGKQSTQGVSQVAPAEPVAVAQPQATQPTTLASSVDSAHSDVASGMSDGNENVPSSSGRHEGRTTKRHYRKSVRSRSRHEKTSRPKLRILNVSNKGDRVVECQLETHNRKMVTFKFDLDGDNPEEIATIMVNNDFILAIERESFVDQVREIIEKADEMLSEDVSVEPEGDQGLESLQGKDDYGFSGSQKLEGEFKQPIPASSMPQQIGIPTSSLTQVVHSAGRRFIVSPVPESRLRESKVFPSEITDTVAASTAQSPGMNLSHSASSLSLQQAFSELRRAQMTEGPNTAPPNFSHTGPTFPVVPPFLSSIAGVPTTAAATAPVPATSSPPNDISTSVIQSEVTVPTEEGIAGVATSTGVVTSGGLPIPPVSESPVLSSVVSSITIPAVVSISTTSPSLQVPTSTSEIVVSSTALYPSVTVSATSASAGGSTATPGPKPPAVVSQQAAGSTTVGATLTSVSTTTSFPSTASQLSIQLSSSTSTPTLAETVVVSAHSLDKTSHSSTTGLAFSLSAPSSSSSPGAGVSSYISQPGGLHPLVIPSVIASTPILPQAAGPTSTPLLPQVPSIPPLVQPVANVPAVQQTLIHSQPQPALLPNQPHTHCPEVDSDTQPKAPGIDDIKTLEEKLRSLFSEHSSSGAQHASVSLETSLVIESTVTPGIPTTAVAPSKLLTSTTSTCLPPTNLPLGTVALPVTPVVTPGQVSTPVSTTTSGVKPGTAPSKPPLTKAPVLPVGTELPAGTLPSEQLPPFPGPSLTQSQQPLEDLDAQLRRTLSPEXITVTSAVGPVSMAAPTAITEAGTQPQKGVSQVKEGPVLATSSGAGVFKMGRFQVSVAADGAQKEGKNKSEDAKSVHFESSTSESSVLSSSSPESTLVKPEPNGITIPGISSDVPESAHKTTASEAKSDTGQPTKVGRFQVTTTANKVGRFSVSKTEDKITDTKKEGPVASPPFMDLEQAVLPAVIPKKEKPELSEPSHLNGPSSDPEAAFLSRDVDDGSGSPHSPHQLSSKSLPSQNLSQSLSNSFNSSYMSSDNESDIEDEDLKLELRRLRDKHLKEIQDLQSRQKHEIESLYTKLGKVPPAVIIPPAAPLSGRRRRPTKSKGSKSSRSSSLGNKSPQLSGNLSGQSAASVLHPQQTLHPPGNIPESGQNQLLQPLKPSPSSDNLYSAFTSDGAISVPSLSAPGQGTSSTNTVGATVNSQAAQAQPPAMTSSRKGTFTDDLHKLVDNWARDAMNLSGRRGSKGHMNYEGPGMARKFSAPGQLCISMTSNLGGSAPISAASATSLGHFTKSMCPPQQYGFPATPFGAQWSGTGGPAPQPLGQFQPVGTASLQNFNISNLQKSISNPPGSNLRTT

SEQ ID NO: 121 - DNA, 5916 bp, Homo Sapiens
  CDS (1)...(5916)
atgtctggcggcgccgcagagaagcagagcagcactcccggttccctgttcctctcgccgccggctcctgcccccaagaatggctccagctccgattcctccgtgggggagaaactgggagccgcggccgccgacgctgtgaccggcaggaccgaggagtacaggcgccgccgccacactatggacaaggacagccgtggggcggccgcgaccactaccaccactgagcaccgcttcttccgccggagcgtcatctgcgactccaatgccactgcactggagcttcccggccttcctctttccctgccccagcccagcatccccgcggctgtcccgcagagtgctccaccggagccccaccgggaagagaccgtgaccgccaccgccacttcccaggtagcccagcagcctccagccgctgccgcccctggggaacaggccgtcgcgggccctgccccctcgactgtccccagcagtaccagcaaagaccgcccagtgtcccagcctagccttgtggggagcaaagaggagccgccgccggcgagaagtggcagcggcggcggcagcgccaaggagccacaggaggaacggagccagcagcaggatgatatcgaagagctggagaccaaggccgtgggaatgtctaacgatggccgctttctcaagtttgacatcgaaatcggcagaggctcctttaagacggtctacaaaggtctggacactgaaaccaccgtggaagtcgcctggtgtgaactgcaggatcgaaaattaacaaagtctgagaggcagagatttaaagaagaagctgaaatgttaaaaggtcttcagcatcccaatattgttagattttatgattcctgggaatccacagtaaaaggaaagaagtgcattgttttggtgactgaacttatgacgtctggaacacttaaaacgtatctgaaaaggtttaaagtgatgaagatcaaagttctaagaagctggtgccgtcagatccttaaaggtcttcagtttcttcatactcgaactccacctatcattcaccgcgatcttaaatgtgacaacatctttatcaccggccctactggctcagtcaagattggagacctcggtctggcaaccctgaagcgggcttcttttgccaagagtgtgataggtaccccagagttcatggcccctgagatgtatgaggagaaatatgatgaatccgttgacgtttatgcttttgggatgtgcatgcttgagatggctacatctgaatatccttactcggagtgccaaaatgctgcacagatctaccgtcgcgtgaccagtggggtgaagccagccagttttgacaaagtagcaattcctgaagtgaaggaaattattgaaggatgcatacgacaaaacaaagatgaaagatattccatcaaagaccttttgaaccatgccttcttccaagaggaaacaggagtacgggtagaattagcagaagaagatgatggagaaaaaatagccataaaattatggctacgtattgaagatattaagaaattaaagggaaaatacaaagataatgaagctattgagttttcttttgatttagagagagatgtcccagaagatgttgcacaagaaatggtagagtctgggtatgtctgtgaaggtgatcacaagaccatggctaaagctatcaaagacagagtatcattaattaagaggaaacgagagcagcggcagttggtacgggaggagcaagaaaaaaaaaagcaggaagagagcagtctcaaacagcaggtagaacaatccagtgcttcccagacaggaatcaagcagctcccttctgctagcaccggcatacctactgcttctaccacttcagcttcagtttctacacaagtagaacctgaagaacctgaggcagatcaacatcaacaactacagtaccagcaacccagtatatctgtgttatctgatgggacggttgacagtggtcagggatcctctgtcttcacagaatctcgagtgagcagccaacagacagtttcatatggttcccaacatgaacaggcacattctacaggcacagtcccagggcatataccttctactgtccaagcacagtctcagccccatggggtatatccaccctcaagtgtgcagcagggaatacagcagacagcccctcctcaacagacagtgcagtattcactttcacagacatcaacctccagtgaggccactactgcacagccagtgagtcagcctcaagctccacaagtcttgcctcaagtatcagctggaaaacagagtactcagggagtctctcaggttgctcctgcagagccagttgcagtagcacagccccaagctacccagccgaccactttggcttcctctgtagacagtgcacattcagatgttgcttcaggtatgagtgatggcaatgagaacgtcccatcttccagtggaaggcatgaaggaagaactacaaaacggcattaccgaaaatctgtaaggagtcgctctcgacatgaaaaaacttcacgcccaaaattaagaattttgaatgtttcaaataaaggagaccgagtagtagaatgtcaattagagactcataataggaaaatggttacattcaaatttgacctagatggtgacaaccccgaggagatagcaacaattatggtgaacaatgactttattctagcaatagagagagagtcgtttgtggatcaagtgcgagaaattattgaaaaagctgatgaaatgctcagtgaggatgtcagtgtggaaccagagggtgatcagggattggagagtctacaaggaaaggatgactatggcttttcaggttctcagaaattggaaggagagttcaaacaaccaattcctgcgtcttccatgccacagcaaataggcattcctaccagttctttaactcaagttgttcattctgcgggaaggcggtttatagtgagtcctgtgccagaaagccgattacgagaatcaaaagttttccccagtgaaataacagatacagttgctgcctctacagctcagagccctggaatgaacttgtctcactctgcatcatcccttagtctacaacaggccttttctgaacttagacgtgcccaaatgacagaaggacccaayacagcacctccaaactttagtcatacaggaccaacatttccagtagtacctcctttcttaagtagcattgctggagtcccaaccacagcagcagccacagcaccagtccctgcaacaagcagccctcctaatgacatttccacatcagtaattcagtctgaggttacagtgcccactgaagaggggattgctggagttgccaccagcacaggtgtggtaacttcaggtggtctccccataccacctgtgtctgaatcaccagtactttccagcgtagtttcaagtatcacaatacctgcagttgtctcaatatctactacatccccgtcacttcaagtccccacatccacatctgagatcgttgtttctagtacagcactgtatccttcagtaacagtttcagcaacttcagcctctgcagggggcagtactgctaccccaggtcctaagcctccagctgtagtatctcagcaggcagcaggcagcactactgtgggagccacattaacatcagtttctaccaccacttcattcccaagcacagcttcacagctgtccattcagcttagcagcagtacttctactcctactttagctgaaaccgtggtagttagcgcacactcactagataagacatctcatagcagtacaactggattggctttctccctctctgcaccatcttcctcttcctctcctggagcaggagtgtctagttatatttctcagcctggtgggctgcatcctttggtcattccatcagtgatagcttctactcctattcttccccaagcagcaggacctacttctacacctttattaccccaagtacctagtatcccacccttggtacagcctgttgccaatgtgcctgctgtacagcagacactaattcatagtcagcctcaaccagctttgcttcccaaccagccccatactcattgtcctgaagtagattctgatacacaacccaaagctcctggaattgatgacataaagactctagaagaaaagctgcggtctctgttcagtgaacacagctcatctggagctcagcatgcctctgtctcactggagacctcactagtcatagagagcactgtcacaccaggcatcccaactactgctgttgcaccaagcaaactcctgacttctaccacaagtacttgcttaccaccaaccaatttaccactaggaacagttgctttgccagttacaccagtggtcacacctgggcaagtttctaccccagtcagcactactacatcaggagtgaaacctggaactgctccctccaagccacctctaactaaggctccggtgctgccagtgggtactgaacttccagcaggtactctacccagcgagcagctgccaccttttccaggaccttctctaacccagtcccagcaacctctagaggatcttgatgctcaattgagaagaacacttagtccagagatkatcacagtgacttctgcggttggtcctgtgtccatggcggctccaacagcaatcacagaagcaggaacacagcctcagaagggtgtttctcaagtcaaagaaggccctgtcctagcaactagttcaggagctggtgtttttaagatgggacgatttcaggtttctgttgcagcagacggtgcccagaaagagggtaaaaataagtcagaagatgcaaagtctgttcattttgaatccagcacctcagagtcctcagtgctatcaagtagtagtccagagagtaccttggtgaaaccagagccgaatggcataaccatccctggtatctcttcagatgtgccagagagtgcccacaaaactactgcctcagaggcaaagtcagacactgggcagcctaccaaggttggacgttttcaggtgacaactacagcaaacaaagtgggtcgtttctctgtatcaaaaactgaggacaagatcactgacacaaagaaagaaggaccagtggcatctcctccttttatggatttggaacaagctgttcttcctgctgtgataccaaagaaagagaagcctgaactgtcagagccttcacatctaaatgggccgtcttctgacccggaggccgcttttttaagtagggatgtggatgatggttccggtagtccacactcgccccatcagctgagctcaaagagccttcctagccagaatctaagtcaaagccttagtaattcatttaactcctcttacatgagtagcgacaatgagtcagatatcgaagatgaagacttaaagttagagctgcgacgactacgagataaacatctcaaagagattcaggacctgcagagtcgccagaagcatgaaattgaatctttgtataccaaactgggcaaggtgccccctgctgttattattcccccagctgctcccctttcagggagaagacgacgacccactaaaagcaaaggcagcaaatctagtcgaagcagttccttggggaataaaagcccccagctttcaggtaacctgtctggtcagagtgcagcttcagtcttgcacccccagcagaccctccaccctcctggcaacatcccagagtccgggcagaatcagctgttacagccccttaagccatctccctccagtgacaacctctattcagccttcaccagtgatggtgccatttcagtaccaagcctttctgctccaggtcaaggaataaagcaaccatcatcgtccaaaaacaataaaatggagatgttgccatacctgggacaaaagcctgttaaggcgggttgggagactagctga

SEQ ID NO: 122 - protein, 1971 aa, Homo Sapiens
  VARIANT 1534: Xaa = Any Amino Acid
MSGGAAEKQSSTPGSLFLSPPAPAPKNGSSSDSSVGEKLGAAAADAVTGRTEEYRRRRHTMDKDSRGAAATTTTTEHRFFRRSVICDSNATALELPGLPLSLPQPSIPAAVPQSAPPEPHREETVTATATSQVAQQPPAAAAPGEQAVAGPAPSTVPSSTSKDRPVSQPSLVGSKEEPPPARSGSGGGSAKEPQEERSQQQDDIEELETKAVGMSNDGRFLKFDIEIGRGSFKTVYKGLDTETTVEVAWCELQDRKLTKSERQRFKEEAEMLKGLQHPNIVRFYDSWESTVKGKKCIVLVTELMTSGTLKTYLKRFKVMKIKVLRSWCRQILKGLQFLHTRTPPIIHRDLKCDNIFITGPTGSVKIGDLGLATLKRASFAKSVIGTPEFMAPEMYEEKYDESVDVYAFGMCMLEMATSEYPYSECQNAAQIYRRVTSGVKPASFDKVAIPEVKEIIEGCIRQNKDERYSIKDLLNHAFFQEETGVRVELAEEDDGEKIAIKLWLRIEDIKKLKGKYKDNEAIEFSFDLERDVPEDVAQEMVESGYVCEGDHKTMAKAIKDRVSLIKRKREQRQLVREEQEKKKQEESSLKQQVEQSSASQTGIKQLPSASTGIPTASTTSASVSTQVEPEEPEADQHQQLQYQQPSISVLSDGTVDSGQGSSVFTESRVSSQQTVSYGSQHEQAHSTGTVPGHIPSTVQAQSQPHGVYPPSSVQQGIQQTAPPQQTVQYSLSQTSTSSEATTAQPVSQPQAPQVLPQVSAGKQSTQGVSQVAPAEPVAVAQPQATQPTTLASSVDSAHSDVASGMSDGNENVPSSSGRHEGRTTKRHYRKSVRSRSRHEKTSRPKLRILNVSNKGDRVVECQLETHNRKMVTFKFDLDGDNPEEIATIMVNNDFILAIERESFVDQVREIIEKADEMLSEDVSVEPEGDQGLESLQGKDDYGFSGSQKLEGEFKQPIPASSMPQQIGIPTSSLTQVVHSAGRRFIVSPVPESRLRESKVFPSEITDTVAASTAQSPGMNLSHSASSLSLQQAFSELRRAQMTEGPNTAPPNFSHTGPTFPVVPPFLSSIAGVPTTAAATAPVPATSSPPNDISTSVIQSEVTVPTEEGIAGVATSTGVVTSGGLPIPPVSESPVLSSVVSSITIPAVVSISTTSPSLQVPTSTSEIVVSSTALYPSVTVSATSASAGGSTATPGPKPPAVVSQQAAGSTTVGATLTSVSTTTSFPSTASQLSIQLSSSTSTPTLAETVVVSAHSLDKTSHSSTTGLAFSLSAPSSSSSPGAGVSSYISQPGGLHPLVIPSVIASTPILPQAAGPTSTPLLPQVPSIPPLVQPVANVPAVQQTLIHSQPQPALLPNQPHTHCPEVDSDTQPKAPGIDDIKTLEEKLRSLFSEHSSSGAQHASVSLETSLVIESTVTPGIPTTAVAPSKLLTSTTSTCLPPTNLPLGTVALPVTPVVTPGQVSTPVSTTTSGVKPGTAPSKPPLTKAPVLPVGTELPAGTLPSEQLPPFPGPSLTQSQQPLEDLDAQLRRTLSPEXITVTSAVGPVSMAAPTAITEAGTQPQKGVSQVKEGPVLATSSGAGVFKMGRFQVSVAADGAQKEGKNKSEDAKSVHFESSTSESSVLSSSSPESTLVKPEPNGITIPGISSDVPESAHKTTASEAKSDTGQPTKVGRFQVTTTANKVGRFSVSKTEDKITDTKKEGPVASPPFMDLEQAVLPAVIPKKEKPELSEPSHLNGPSSDPEAAFLSRDVDDGSGSPHSPHQLSSKSLPSQNLSQSLSNSFNSSYMSSDNESDIEDEDLKLELRRLRDKHLKEIQDLQSRQKHEIESLYTKLGKVPPAVIIPPAAPLSGRRRRPTKSKGSKSSRSSSLGNKSPQLSGNLSGQSAASVLHPQQTLHPPGNIPESGQNQLLQPLKPSPSSDNLYSAFTSDGAISVPSLSAPGQGIKQPSSSKNNKMEMLPYLGQKPVKAGWETS

SEQ ID NO: 123 - DNA, 6969 bp, Homo Sapiens
  CDS (1)...(6969)
atggacaaggacagccgtggggcggccgcgaccactaccaccactgagcaccgcttcttccgccggagcgtcatctgcgactccaatgccactgcactggagcttcccggccttcctctttccctgccccagcccagcatccccgcggctgtcccgcagagtgctccaccggagccccaccgggaagagaccgtgaccgccaccgccacttcccaggtagcccagcagcctccagccgctgccgcccctggggaacaggccgtcgcgggccctgccccctcgactgtccccagcagtaccagcaaagaccgcccagtgtcccagcctagccttgtggggagcaaagaggagccgccgccggcgagaagtggcagcggcggcggcagcgccaaggagccacaggaggaacggagccagcagcaggatgatatcgaagagctggagaccaaggccgtgggaatgtctaacgatggccgctttctcaagtttgacatcgaaatcggcagaggctcctttaagacggtctacaaaggtctggacactgaaaccaccgtggaagtcgcctggtgtgaactgcaggatcgaaaattaacaaagtctgagaggcagagatttaaagaagaagctgaaatgttaaaaggtcttcagcatcccaatattgttagattttatgattcctgggaatccacagtaaaaggaaagaagtgcattgttttggtgactgaacttatgacgtctggaacacttaaaacgtatctgaaaaggtttaaagtgatgaagatcaaagttctaagaagctggtgccgtcagatccttaaaggtcttcagtttcttcatactcgaactccacctatcattcaccgcgatcttaaatgtgacaacatctttatcaccggccctactggctcagtcaagattggagacctcggtctggcaaccctgaagcgggcttcttttgccaagagtgtgataggtaccccagagttcatggcccctgagatgtatgaggagaaatatgatgaatccgttgacgtttatgcttttgggatgtgcatgcttgagatggctacatctgaatatccttactcggagtgccaaaatgctgcacagatctaccgtcgcgtgaccagtggggtgaagccagccagttttgacaaagtagcaattcctgaagtgaaggaaattattgaaggatgcatacgacaaaacaaagatgaaagatattccatcaaagaccttttgaaccatgccttcttccaagaggaaacaggagtacgggtagaattagcagaagaagatgatggagaaaaaatagccataaaattatggctacgtattgaagatattaagaaattaaagggaaaatacaaagataatgaagctattgagttttcttttgatttagagagagatgtcccagaagatgttgcacaagaaatggtagagtctgggtatgtctgtgaaggtgatcacaagaccatggctaaagctatcaaagacagagtatcattaattaagaggaaacgagagcagcggcagttggtacgggaggagcaagaaaaaaaaaagcaggaagagagcagtctcaaacagcaggtagaacaatccagtgcttcccagacaggaatcaagcagctcccttctgctagcaccggcatacctactgcttctaccacttcagcttcagtttctacacaagtagaacctgaagaacctgaggcagatcaacatcaacaactacagtaccagcaacccagtatatctgtgttatctgatgggacggttgacagtggtcagggatcctctgtcttcacagaatctcgagtgagcagccaacagacagtttcatatggttcccaacatgaacaggcacattctacaggcacagtcccagggcatataccttctactgtccaagcacagtctcagccccatggggtatatccaccctcaagtgtggcacaggggcagagccagggtcagccatcctcaagtagcttaacaggggtttcatcttcccaacccatacaacatcctcagcagcagcagggaatacagcagacagcccctcctcaacagacagtgcagtattcactttcacagacatcaacctccagtgaggccactactgcacagccagtgagtcagcctcaagctccacaagtcttgcctcaagtatcagctggaaaacagcttccagtttcccagccagtaccaactatccaaggcgaacctcagatcccagttgcgacacaaccctcggttgttccagtccactctggtgctcatttccttccagtgggacagccgctccctactcccttgctccctcagtaccctgtctctcagattcccatatcaactcctcatgtgtctacggctcagacaggtttctcatcccttcccatcacaatggcagctggcattactcagcctctgctcacgttggcttcatctgctacaacagctgcgatcccgggggtatcaactgtggttcctagtcagcttccaacccttctgcagcctgtgactcagctgccaagtcaggttcacccacagctcctacaaccagcagttcagtccatgggaataccagctaaccttggacaagctgctgaggttccactttcctctggagatgttctgtaccagggcttcccacctcgactgccaccacagtacccaggagattcaaatattgctccctcttccaacgtggcttctgtttgcatccattctacagtcctawcccctcccatgccgacagaagtactggctacacctgggtactttcccacagtggtgcagccttatgtggaatcaaatcttttagttcctatgggtggtgtaggaggacaggttcaagtgtcccagccaggagggagtttagcacaagcccccactacatcctcccagcaagcagttttggagagtactcagggagtctctcaggttgctcctgcagagccagttgcagtagcacagccccaagctacccagccgaccactttggcttcctctgtagacagtgcacattcagatgttgcttcaggtatgagtgatggcaatgagaacgtcccatcttccagtggaaggcatgaaggaagaactacaaaacggcattaccgaaaatctgtaaggagtcgctctcgacatgaaaaaacttcacgcccaaaattaagaattttgaatgtttcaaataaaggagaccgagtagtagaatgtcaattagagactcataataggaaaatggttacattcaaatttgacctagatggtgacaaccccgaggagatagcaacaattatggtgaacaatgactttattctagcaatagagagagagtcgtttgtggatcaagtgcgagaaattattgaaaaagctgatgaaatgctcagtgaggatgtcagtgtggaaccagagggtgatcagggattggagagtctacaaggaaaggatgactatggcttttcaggttctcagaaattggaaggagagttcaaacaaccaattcctgcgtcttccatgccacagcaaataggcattcctaccagttctttaactcaagttgttcattctgcgggaaggcggtttatagtgagtcctgtgccagaaagccgattacgagaatcaaaagttttccccagtgaaataacagatacagttgctgcctctacagctcagagccctggaatgaacttgtctcactctgcatcatcccttagtctacaacaggccttttctgaacttagacgtgcccaaatgacagaaggacccaayacagcacctccaaactttagtcatacaggaccaacatttccagtagtacctcctttcttaagtagcattgctggagtcccaaccacagcagcagccacagcaccagtccctgcaacaagcagccctcctaatgacatttccacatcagtaattcagtctgaggttacagtgcccactgaagaggggattgctggagttgccaccagcacaggtgtggtaacttcaggtggtctccccataccacctgtgtctgaatcaccagtactttccagcgtagtttcaagtatcacaatacctgcagttgtctcaatatctactacatccccgtcacttcaagtccccacatccacatctgagatcgttgtttctagtacagcactgtatccttcagtaacagtttcagcaacttcagcctctgcagggggcagtactgctaccccaggtcctaagcctccagctgtagtatctcagcaggcagcaggcagcactactgtgggagccacattaacatcagtttctaccaccacttcattcccaagcacagcttcacagctgtccattcagcttagcagcagtacttctactcctactttagctgaaaccgtggtagttagcgcacactcactagataagacatctcatagcagtacaactggattggctttctccctctctgcaccatcttcctcttcctctcctggagcaggagtgtctagttatatttctcagcctggtgggctgcatcctttggtcattccatcagtgatagcttctactcctattcttccccaagcagcaggacctacttctacacctttattaccccaagtacctagtatcccacccttggtacagcctgttgccaatgtgcctgctgtacagcagacactaattcatagtcagcctcaaccagctttgcttcccaaccagccccatactcattgtcctgaagtagattctgatacacaacccaaagctcctggaattgatgacataaagactctagaagaaaagctgcggtctctgttcagtgaacacagctcatctggagctcagcatgcctctgtctcactggagacctcactagtcatagagagcactgtcacaccaggcatcccaactactgctgttgcaccaagcaaactcctgacttctaccacaagtacttgcttaccaccaaccaatttaccactaggaacagttgctttgccagttacaccagtggtcacacctgggcaagtttctaccccagtcagcactactacatcaggagtgaaacctggaactgctccctccaagccacctctaactaaggctccggtgctgccagtgggtactgaacttccagcaggtactctacccagcgagcagctgccaccttttccaggaccttctctaacccagtcccagcaacctctagaggatcttgatgctcaattgagaagaacacttagtccagagatkatcacagtgacttctgcggttggtcctgtgtccatggcggctccaacagcaatcacagaagcaggaacacagcctcagaagggtgtttctcaagtcaaagaaggccctgtcctagcaactagttcaggagctggtgtttttaagatgggacgatttcaggtttctgttgcagcagacggtgcccagaaagagggtaaaaataagtcagaagatgcaaagtctgttcattttgaatccagcacctcagagtcctcagtgctatcaagtagtagtccagagagtaccttggtgaaaccagagccgaatggcataaccatccctggtatctcttcagatgtgccagagagtgcccacaaaactactgcctcagaggcaaagtcagacactgggcagcctaccaaggttggacgttttcaggtgacaactacagcaaacaaagtgggtcgtttctctgtatcaaaaactgaggacaagatcactgacacaaagaaagaaggaccagtggcatctcctccttttatggatttggaacaagctgttcttcctgctgtgataccaaagaaagagaagcctgaactgtcagagccttcacatctaaatgggccgtcttctgacccggaggccgcttttttaagtagggatgtggatgatggttccggtagtccacactcgccccatcagctgagctcaaagagccttcctagccagaatctaagtcaaagccttagtaattcatttaactcctcttacatgagtagcgacaatgagtcagatatcgaagatgaagacttaaagttagagctgcgacgactacgagataaacatctcaaagagattcaggacctgcagagtcgccagaagcatgaaattgaatctttgtataccaaactgggcaaggtgccccctgctgttattattcccccagctgctcccctttcagggagaagacgacgacccactaaaagcaaaggcagcaaatctagtcgaagcagttccttggggaataaaagcccccagctttcaggtaacctgtctggtcagagtgcagcttcagtcttgcacccccagcagaccctccaccctcctggcaacatcccagagtccgggcagaatcagctgttacagccccttaagccatctccctccagtgacaacctctattcagccttcaccagtgatggtgccatttcagtaccaagcctttctgctccaggtcaaggaaccagcagcacaaacactgttggggcaacagtgaacagccaagccgcccaagctcagcctcctgccatgacgtccagcaggaagggcacattcacagatgacttgcacaagttggtagacaattgggcccgagatgccatgaatctctcaggcaggagaggaagcaaagggcacatgaattatgagggccctggaatggcaaggaagttctctgcacctgggcaactgtgcatctccatgacctcgaacctgggtggctctgcccccatctctgcagcatcagctacctctctaggtcacttcaccaagtctatgtgccccccacagcagtatggctttccagctaccccatttggcgctcaatggagtgggacgggtggcccagcaccacagccacttggccagttccaacctgtgggaactgcctccttgcagaatttcaacatcagcaatttgcagaaatccatcagcaaccccccaggctccaacctgcggaccacttag

SEQ ID NO: 124 - protein, 2322 aa, Homo Sapiens
  VARIANT 917, 1748: Xaa = Any Amino Acid
MDKDSRGAAATTTTTEHRFFRRSVICDSNATALELPGLPLSLPQPSIPAAVPQSAPPEPHREETVTATATSQVAQQPPAAAAPGEQAVAGPAPSTVPSSTSKDRPVSQPSLVGSKEEPPPARSGSGGGSAKEPQEERSQQQDDIEELETKAVGMSNDGRFLKFDIEIGRGSFKTVYKGLDTETTVEVAWCELQDRKLTKSERQRFKEEAEMLKGLQHPNIVRFYDSWESTVKGKKCIVLVTELMTSGTLKTYLKRFKVMKIKVLRSWCRQILKGLQFLHTRTPPIIHRDLKCDNIFITGPTGSVKIGDLGLATLKRASFAKSVIGTPEFMAPEMYEEKYDESVDVYAFGMCMLEMATSEYPYSECQNAAQIYRRVTSGVKPASFDKVAIPEVKEIIEGCIRQNKDERYSIKDLLNHAFFQEETGVRVELAEEDDGEKIAIKLWLRIEDIKKLKGKYKDNEAIEFSFDLERDVPEDVAQEMVESGYVCEGDHKTMAKAIKDRVSLIKRKREQRQLVREEQEKKKQEESSLKQQVEQSSASQTGIKQLPSASTGIPTASTTSASVSTQVEPEEPEADQHQQLQYQQPSISVLSDGTVDSGQGSSVFTESRVSSQQTVSYGSQHEQAHSTGTVPGHIPSTVQAQSQPHGVYPPSSVAQGQSQGQPSSSSLTGVSSSQPIQHPQQQQGIQQTAPPQQTVQYSLSQTSTSSEATTAQPVSQPQAPQVLPQVSAGKQLPVSQPVPTIQGEPQIPVATQPSVVPVHSGAHFLPVGQPLPTPLLPQYPVSQIPISTPHVSTAQTGFSSLPITMAAGITQPLLTLASSATTAAIPGVSTVVPSQLPTLLQPVTQLPSQVHPQLLQPAVQSMGIPANLGQAAEVPLSSGDVLYQGFPPRLPPQYPGDSNIAPSSNVASVCIHSTVLXPPMPTEVLATPGYFPTVVQPYVESNLLVPMGGVGGQVQVSQPGGSLAQAPTTSSQQAVLESTQGVSQVAPAEPVAVAQPQATQPTTLASSVDSAHSDVASGMSDGNENVPSSSGRHEGRTTKRHYRKSVRSRSRHEKTSRPKLRILNVSNKGDRVVECQLETHNRKMVTFKFDLDGDNPEEIATIMVNNDFILAIERESFVDQVREIIEKADEMLSEDVSVEPEGDQGLESLQGKDDYGFSGSQKLEGEFKQPIPASSMPQQIGIPTSSLTQVVHSAGRRFIVSPVPESRLRESKVFPSEITDTVAASTAQSPGMNLSHSASSLSLQQAFSELRRAQMTEGPNTAPPNFSHTGPTFPVVPPFLSSIAGVPTTAAATAPVPATSSPPNDISTSVIQSEVTVPTEEGIAGVATSTGVVTSGGLPIPPVSESPVLSSVVSSITIPAVVSISTTSPSLQVPTSTSEIVVSSTALYPSVTVSATSASAGGSTATPGPKPPAVVSQQAAGSTTVGATLTSVSTTTSFPSTASQLSIQLSSSTSTPTLAETVVVSAHSLDKTSHSSTTGLAFSLSAPSSSSSPGAGVSSYISQPGGLHPLVIPSVIASTPILPQAAGPTSTPLLPQVPSIPPLVQPVANVPAVQQTLIHSQPQPALLPNQPHTHCPEVDSDTQPKAPGIDDIKTLEEKLRSLFSEHSSSGAQHASVSLETSLVIESTVTPGIPTTAVAPSKLLTSTTSTCLPPTNLPLGTVALPVTPVVTPGQVSTPVSTTTSGVKPGTAPSKPPLTKAPVLPVGTELPAGTLPSEQLPPFPGPSLTQSQQPLEDLDAQLRRTLSPEXITVTSAVGPVSMAAPTAITEAGTQPQKGVSQVKEGPVLATSSGAGVFKMGRFQVSVAADGAQKEGKNKSEDAKSVHFESSTSESSVLSSSSPESTLVKPEPNGITIPGISSDVPESAHKTTASEAKSDTGQPTKVGRFQVTTTANKVGRFSVSKTEDKITDTKKEGPVASPPFMDLEQAVLPAVIPKKEKPELSEPSHLNGPSSDPEAAFLSRDVDDGSGSPHSPHQLSSKSLPSQNLSQSLSNSFNSSYMSSDNESDIEDEDLKLELRRLRDKHLKEIQDLQSRQKHEIESLYTKLGKVPPAVIIPPAAPLSGRRRRPTKSKGSKSSRSSSLGNKSPQLSGNLSGQSAASVLHPQQTLHPPGNIPESGQNQLLQPLKPSPSSDNLYSAFTSDGAISVPSLSAPGQGTSSTNTVGATVNSQAAQAQPPAMTSSRKGTFTDDLHKLVDNWARDAMNLSGRRGSKGHMNYEGPGMARKFSAPGQLCISMTSNLGGSAPISAASATSLGHFTKSMCPPQQYGFPATPFGAQWSGTGGPAPQPLGQFQPVGTASLQNFNISNLQKSISNPPGSNLRTT

SEQ ID NO: 125 - DNA, 6558 bp, Homo Sapiens
  CDS (1)...(6558)
atggacaaggacagccgtggggcggccgcgaccactaccaccactgagcaccgcttcttccgccggagcgtcatctgcgactccaatgccactgcactggagcttcccggccttcctctttccctgccccagcccagcatccccgcggctgtcccgcagagtgctccaccggagccccaccgggaagagaccgtgaccgccaccgccacttcccaggtagcccagcagcctccagccgctgccgcccctggggaacaggccgtcgcgggccctgccccctcgactgtccccagcagtaccagcaaagaccgcccagtgtcccagcctagccttgtggggagcaaagaggagccgccgccggcgagaagtggcagcggcggcggcagcgccaaggagccacaggaggaacggagccagcagcaggatgatatcgaagagctggagaccaaggccgtgggaatgtctaacgatggccgctttctcaagtttgacatcgaaatcggcagaggctcctttaagacggtctacaaaggtctggacactgaaaccaccgtggaagtcgcctggtgtgaactgcaggatcgaaaattaacaaagtctgagaggcagagatttaaagaagaagctgaaatgttaaaaggtcttcagcatcccaatattgttagattttatgattcctgggaatccacagtaaaaggaaagaagtgcattgttttggtgactgaacttatgacgtctggaacacttaaaacgtatctgaaaaggtttaaagtgatgaagatcaaagttctaagaagctggtgccgtcagatccttaaaggtcttcagtttcttcatactcgaactccacctatcattcaccgcgatcttaaatgtgacaacatctttatcaccggccctactggctcagtcaagattggagacctcggtctggcaaccctgaagcgggcttcttttgccaagagtgtgataggtaccccagagttcatggcccctgagatgtatgaggagaaatatgatgaatccgttgacgtttatgcttttgggatgtgcatgcttgagatggctacatctgaatatccttactcggagtgccaaaatgctgcacagatctaccgtcgcgtgaccagtggggtgaagccagccagttttgacaaagtagcaattcctgaagtgaaggaaattattgaaggatgcatacgacaaaacaaagatgaaagatattccatcaaagaccttttgaaccatgccttcttccaagaggaaacaggagtacgggtagaattagcagaagaagatgatggagaaaaaatagccataaaattatggctacgtattgaagatattaagaaattaaagggaaaatacaaagataatgaagctattgagttttcttttgatttagagagagatgtcccagaagatgttgcacaagaaatggtagagtctgggtatgtctgtgaaggtgatcacaagaccatggctaaagctatcaaagacagagtatcattaattaagaggaaacgagagcagcggcagttggtacgggaggagcaagaaaaaaaaaagcaggaagagagcagtctcaaacagcaggtagaacaatccagtgcttcccagacaggaatcaagcagctcccttctgctagcaccggcatacctactgcttctaccacttcagcttcagtttctacacaagtagaacctgaagaacctgaggcagatcaacatcaacaactacagtaccagcaacccagtatatctgtgttatctgatgggacggttgacagtggtcagggatcctctgtcttcacagaatctcgagtgagcagccaacagacagtttcatatggttcccaacatgaacaggcacattctacaggcacagtcccagggcatataccttctactgtccaagcacagtctcagccccatggggtatatccaccctcaagtgtggcacaggggcagagccagggtcagccatcctcaagtagcttaacaggggtttcatcttcccaacccatacaacatcctcagcagcagcagggaatacagcagacagcccctcctcaacagacagtgcagtattcactttcacagacatcaacctccagtgaggccactactgcacagccagtgagtcagcctcaagctccacaagtcttgcctcaagtatcagctggaaaacagcttccagtttcccagccagtaccaactatccaaggcgaacctcagatcccagttgcgacacaaccctcggttgttccagtccactctggtgctcatttccttccagtgggacagccgctccctactcccttgctccctcagtaccctgtctctcagattcccatatcaactcctcatgtgtctacggctcagacaggtttctcatcccttcccatcacaatggcagctggcattactcagcctctgctcacgttggcttcatctgctacaacagctgcgatcccgggggtatcaactgtggttcctagtcagcttccaacccttctgcagcctgtgactcagctgccaagtcaggttcacccacagctcctacaaccagcagttcagtccatgggaataccagctaaccttggacaagctgctgaggttccactttcctctggagatgttctgtaccagggcttcccacctcgactgccaccacagtacccaggagattcaaatattgctccctcttccaacgtggcttctgtttgcatccattctacagtcctawcccctcccatgccgacagaagtactggctacacctgggtactttcccacagtggtgcagccttatgtggaatcaaatcttttagttcctatgggtggtgtaggaggacaggttcaagtgtcccagccaggagggagtttagcacaagcccccactacatcctcccagcaagcagttttggagagtactcagggagtctctcaggttgctcctgcagagccagttgcagtagcacagccccaagctacccagccgaccactttggcttcctctgtagacagtgcacattcagatgttgcttcaggtatgagtgatggcaatgagaacgtcccatcttccagtggaaggcatgaaggaagaactacaaaacggcattaccgaaaatctgtaaggagtcgctctcgacatgaaaaaacttcacgcccaaaattaagaattttgaatgtttcaaataaaggagaccgagtagtagaatgtcaattagagactcataataggaaaatggttacattcaaatttgacctagatggtgacaaccccgaggagatagcaacaattatggtgaacaatgactttattctagcaatagagagagagtcgtttgtggatcaagtgcgagaaattattgaaaaagctgatgaaatgctcagtgaggatgtcagtgtggaaccagagggtgatcagggattggagagtctacaaggaaaggatgactatggcttttcaggttctcagaaattggaaggagagttcaaacaaccaattcctgcgtcttccatgccacagcaaataggcattcctaccagttctttaactcaagttgttcattctgcgggaaggcggtttatagtgagtcctgtgccagaaagccgattacgagaatcaaaagttttccccagtgaaataacagatacagttgctgcctctacagctcagagccctggaatgaacttgtctcactctgcatcatcccttagtctacaacaggccttttctgaacttagacgtgcccaaatgacagaaggacccaayacagcacctccaaactttagtcatacaggaccaacatttccagtagtacctcctttcttaagtagcattgctggagtcccaaccacagcagcagccacagcaccagtccctgcaacaagcagccctcctaatgacatttccacatcagtaattcagtctgaggttacagtgcccactgaagaggggattgctggagttgccaccagcacaggtgtggtaacttcaggtggtctccccataccacctgtgtctgaatcaccagtactttccagcgtagtttcaagtatcacaatacctgcagttgtctcaatatctactacatccccgtcacttcaagtccccacatccacatctgagatcgttgtttctagtacagcactgtatccttcagtaacagtttcagcaacttcagcctctgcagggggcagtactgctaccccaggtcctaagcctccagctgtagtatctcagcaggcagcaggcagcactactgtgggagccacattaacatcagtttctaccaccacttcattcccaagcacagcttcacagctgtccattcagcttagcagcagtacttctactcctactttagctgaaaccgtggtagttagcgcacactcactagataagacatctcatagcagtacaactggattggctttctccctctctgcaccatcttcctcttcctctcctggagcaggagtgtctagttatatttctcagcctggtgggctgcatcctttggtcattccatcagtgatagcttctactcctattcttccccaagcagcaggacctacttctacacctttattaccccaagtacctagtatcccacccttggtacagcctgttgccaatgtgcctgctgtacagcagacactaattcatagtcagcctcaaccagctttgcttcccaaccagccccatactcattgtcctgaagtagattctgatacacaacccaaagctcctggaattgatgacataaagactctagaagaaaagctgcggtctctgttcagtgaacacagctcatctggagctcagcatgcctctgtctcactggagacctcactagtcatagagagcactgtcacaccaggcatcccaactactgctgttgcaccaagcaaactcctgacttctaccacaagtacttgcttaccaccaaccaatttaccactaggaacagttgctttgccagttacaccagtggtcacacctgggcaagtttctaccccagtcagcactactacatcaggagtgaaacctggaactgctccctccaagccacctctaactaaggctccggtgctgccagtgggtactgaacttccagcaggtactctacccagcgagcagctgccaccttttccaggaccttctctaacccagtcccagcaacctctagaggatcttgatgctcaattgagaagaacacttagtccagagatkatcacagtgacttctgcggttggtcctgtgtccatggcggctccaacagcaatcacagaagcaggaacacagcctcagaagggtgtttctcaagtcaaagaaggccctgtcctagcaactagttcaggagctggtgtttttaagatgggacgatttcaggtttctgttgcagcagacggtgcccagaaagagggtaaaaataagtcagaagatgcaaagtctgttcattttgaatccagcacctcagagtcctcagtgctatcaagtagtagtccagagagtaccttggtgaaaccagagccgaatggcataaccatccctggtatctcttcagatgtgccagagagtgcccacaaaactactgcctcagaggcaaagtcagacactgggcagcctaccaaggttggacgttttcaggtgacaactacagcaaacaaagtgggtcgtttctctgtatcaaaaactgaggacaagatcactgacacaaagaaagaaggaccagtggcatctcctccttttatggatttggaacaagctgttcttcctgctgtgataccaaagaaagagaagcctgaactgtcagagccttcacatctaaatgggccgtcttctgacccggaggccgcttttttaagtagggatgtggatgatggttccggtagtccacactcgccccatcagctgagctcaaagagccttcctagccagaatctaagtcaaagccttagtaattcatttaactcctcttacatgagtagcgacaatgagtcagatatcgaagatgaagacttaaagttagagctgcgacgactacgagataaacatctcaaagagattcaggacctgcagagtcgccagaagcatgaaattgaatctttgtataccaaactgggcaaggtgccccctgctgttattattcccccagctgctcccctttcagggagaagacgacgacccactaaaagcaaaggcagcaaatctagtcgaagcagttccttggggaataaaagcccccagctttcaggtaacctgtctggtcagagtgcagcttcagtcttgcacccccagcagaccctccaccctcctggcaacatcccagagtccgggcagaatcagctgttacagccccttaagccatctccctccagtgacaacctctattcagccttcaccagtgatggtgccatttcagtaccaagcctttctgctccaggtcaaggaataaagcaaccatcatcgtccaaaaacaataaaatggagatgttgccatacctgggacaaaagcctgttaaggcgggttgggagactagctga

SEQ ID NO: 126 - protein, 2185 aa, Homo Sapiens
  VARIANT 917, 1748: Xaa = Any Amino Acid
MDKDSRGAAATTTTTEHRFFRRSVICDSNATALELPGLPLSLPQPSIPAAVPQSAPPEPHREETVTATATSQVAQQPPAAAAPGEQAVAGPAPSTVPSSTSKDRPVSQPSLVGSKEEPPPARSGSGGGSAKEPQEERSQQQDDIEELETKAVGMSNDGRFLKFDIEIGRGSFKTVYKGLDTETTVEVAWCELQDRKLTKSERQRFKEEAEMLKGLQHPNIVRFYDSWESTVKGKKCIVLVTELMTSGTLKTYLKRFKVMKIKVLRSWCRQILKGLQFLHTRTPPIIHRDLKCDNIFITGPTGSVKIGDLGLATLKRASFAKSVIGTPEFMAPEMYEEKYDESVDVYAFGMCMLEMATSEYPYSECQNAAQIYRRVTSGVKPASFDKVAIPEVKEIIEGCIRQNKDERYSIKDLLNHAFFQEETGVRVELAEEDDGEKIAIKLWLRIEDIKKLKGKYKDNEAIEFSFDLERDVPEDVAQEMVESGYVCEGDHKTMAKAIKDRVSLIKRKREQRQLVREEQEKKKQEESSLKQQVEQSSASQTGIKQLPSASTGIPTASTTSASVSTQVEPEEPEADQHQQLQYQQPSISVLSDGTVDSGQGSSVFTESRVSSQQTVSYGSQHEQAHSTGTVPGHIPSTVQAQSQPHGVYPPSSVAQGQSQGQPSSSSLTGVSSSQPIQHPQQQQGIQQTAPPQQTVQYSLSQTSTSSEATTAQPVSQPQAPQVLPQVSAGKQLPVSQPVPTIQGEPQIPVATQPSVVPVHSGAHFLPVGQPLPTPLLPQYPVSQIPISTPHVSTAQTGFSSLPITMAAGITQPLLTLASSATTAAIPGVSTVVPSQLPTLLQPVTQLPSQVHPQLLQPAVQSMGIPANLGQAAEVPLSSGDVLYQGFPPRLPPQYPGDSNIAPSSNVASVCIHSTVLXPPMPTEVLATPGYFPTVVQPYVESNLLVPMGGVGGQVQVSQPGGSLAQAPTTSSQQAVLESTQGVSQVAPAEPVAVAQPQATQPTTLASSVDSAHSDVASGMSDGNENVPSSSGRHEGRTTKRHYRKSVRSRSRHEKTSRPKLRILNVSNKGDRVVECQLETHNRKMVTFKFDLDGDNPEEIATIMVNNDFILAIERESFVDQVREIIEKADEMLSEDVSVEPEGDQGLESLQGKDDYGFSGSQKLEGEFKQPIPASSMPQQIGIPTSSLTQVVHSAGRRFIVSPVPESRLRESKVFPSEITDTVAASTAQSPGMNLSHSASSLSLQQAFSELRRAQMTEGPNTAPPNFSHTGPTFPVVPPFLSSIAGVPTTAAATAPVPATSSPPNDISTSVIQSEVTVPTEEGIAGVATSTGVVTSGGLPIPPVSESPVLSSVVSSITIPAVVSISTTSPSLQVPTSTSEIVVSSTALYPSVTVSATSASAGGSTATPGPKPPAVVSQQAAGSTTVGATLTSVSTTTSFPSTASQLSIQLSSSTSTPTLAETVVVSAHSLDKTSHSSTTGLAFSLSAPSSSSSPGAGVSSYISQPGGLHPLVIPSVIASTPILPQAAGPTSTPLLPQVPSIPPLVQPVANVPAVQQTLIHSQPQPALLPNQPHTHCPEVDSDTQPKAPGIDDIKTLEEKLRSLFSEHSSSGAQHASVSLETSLVIESTVTPGIPTTAVAPSKLLTSTTSTCLPPTNLPLGTVALPVTPVVTPGQVSTPVSTTTSGVKPGTAPSKPPLTKAPVLPVGTELPAGTLPSEQLPPFPGPSLTQSQQPLEDLDAQLRRTLSPEXITVTSAVGPVSMAAPTAITEAGTQPQKGVSQVKEGPVLATSSGAGVFKMGRFQVSVAADGAQKEGKNKSEDAKSVHFESSTSESSVLSSSSPESTLVKPEPNGITIPGISSDVPESAHKTTASEAKSDTGQPTKVGRFQVTTTANKVGRFSVSKTEDKITDTKKEGPVASPPFMDLEQAVLPAVIPKKEKPELSEPSHLNGPSSDPEAAFLSRDVDDGSGSPHSPHQLSSKSLPSQNLSQSLSNSFNSSYMSSDNESDIEDEDLKLELRRLRDKHLKEIQDLQSRQKHEIESLYTKLGKVPPAVIIPPAAPLSGRRRRPTKSKGSKSSRSSSLGNKSPQLSGNLSGQSAASVLHPQQTLHPPGNIPESGQNQLLQPLKPSPSSDNLYSAFTSDGAISVPSLSAPGQGIKQPSSSKNNKMEMLPYLGQKPVKAGWETS

SEQ ID NO: 127 - DNA, 2769 bp, Homo Sapiens
  CDS (1)...(2769)
atggacaaggacagccgtggggcggccgcgaccactaccaccactgagcaccgcttcttccgccggagcgtcatctgcgactccaatgccactgcactggagcttcccggccttcctctttccctgccccagcccagcatccccgcggctgtcccgcagagtgctccaccggagccccaccgggaagagaccgtgaccgccaccgccacttcccaggtagcccagcagcctccagccgctgccgcccctggggaacaggccgtcgcgggccctgccccctcgactgtccccagcagtaccagcaaagaccgcccagtgtcccagcctagccttgtggggagcaaagaggagccgccgccggcgagaagtggcagcggcggcggcagcgccaaggagccacaggaggaacggagccagcagcaggatgatatcgaagagctggagaccaaggccgtgggaatgtctaacgatggccgctttctcaagtttgacatcgaaatcggcagaggctcctttaagacggtctacaaaggtctggacactgaaaccaccgtggaagtcgcctggtgtgaactgcaggatcgaaaattaacaaagtctgagaggcagagatttaaagaagaagctgaaatgttaaaaggtcttcagcatcccaatattgttagattttatgattcctgggaatccacagtaaaaggaaagaagtgcattgttttggtgactgaacttatgacgtctggaacacttaaaacgtatctgaaaaggtttaaagtgatgaagatcaaagttctaagaagctggtgccgtcagatccttaaaggtcttcagtttcttcatactcgaactccacctatcattcaccgcgatcttaaatgtgacaacatctttatcaccggccctactggctcagtcaagattggagacctcggtctggcaaccctgaagcgggcttcttttgccaagagtgtgataggtaccccagagttcatggcccctgagatgtatgaggagaaatatgatgaatccgttgacgtttatgcttttgggatgtgcatgcttgagatggctacatctgaatatccttactcggagtgccaaaatgctgcacagatctaccgtcgcgtgaccagtggggtgaagccagccagttttgacaaagtagcaattcctgaagtgaaggaaattattgaaggatgcatacgacaaaacaaagatgaaagatattccatcaaagaccttttgaaccatgccttcttccaagaggaaacaggagtacgggtagaattagcagaagaagatgatggagaaaaaatagccataaaattatggctacgtattgaagatattaagaaattaaagggaaaatacaaagataatgaagctattgagttttcttttgatttagagagagatgtcccagaagatgttgcacaagaaatggtagagtctgggtatgtctgtgaaggtgatcacaagaccatggctaaagctatcaaagacagagtatcattaattaagaggaaacgagagcagcggcagttggtacgggaggagcaagaaaaaaaaaagcaggaagagagcagtctcaaacagcaggtagaacaatccagtgcttcccagacaggaatcaagcagctcccttctgctagcaccggcatacctactgcttctaccacttcagcttcagtttctacacaagtagaacctgaagaacctgaggcagatcaacatcaacaactacagtaccagcaacccagtatatctgtgttatctgatgggacggttgacagtggtcagggatcctctgtcttcacagaatctcgagtgagcagccaacagacagtttcatatggttcccaacatgaacaggcacattctacaggcacagtcccagggcatataccttctactgtccaagcacagtctcagccccatggggtatatccaccctcaagtgtggcacaggggcagagccagggtcagccatcctcaagtagcttaacaggggtttcatcttcccaacccatacaacatcctcagcagcagcagggaatacagcagacagcccctcctcaacagacagtgcagtattcactttcacagacatcaacctccagtgaggccactactgcacagccagtgagtcagcctcaagctccacaagtcttgcctcaagtatcagctggaaaacagcttccagtttcccagccagtaccaactatccaaggcgaacctcagatcccagttgcgacacaaccctcggttgttccagtccactctggtgctcatttccttccagtgggacagccgctccctactcccttgctccctcagtaccctgtctctcagattcccatatcaactcctcatgtgtctacggctcagacaggtttctcatcccttcccatcacaatggcagctggcattactcagcctctgctcacgttggcttcatctgctacaacagctgcgatcccgggggtatcaactgtggttcctagtcagcttccaacccttctgcagcctgtgactcagctgccaagtcaggttcacccacagctcctacaaccagcagttcagtccatgggaataccagctaaccttggacaagctgctgaggttccactttcctctggagatgttctgtaccagggcttcccacctcgactgccaccacagtacccaggagattcaaatattgctccctcttccaacgtggcttctgtttgcatccattctacagtcctawcccctataccttctgcataa

SEQ ID NO: 128 - protein, 922 aa, Homo Sapiens
  VARIANT 917: Xaa = Any Amino Acid
MDKDSRGAAATTTTTEHRFFRRSVICDSNATALELPGLPLSLPQPSIPAAVPQSAPPEPHREETVTATATSQVAQQPPAAAAPGEQAVAGPAPSTVPSSTSKDRPVSQPSLVGSKEEPPPARSGSGGGSAKEPQEERSQQQDDIEELETKAVGMSNDGRFLKFDIEIGRGSFKTVYKGLDTETTVEVAWCELQDRKLTKSERQRFKEEAEMLKGLQHPNIVRFYDSWESTVKGKKCIVLVTELMTSGTLKTYLKRFKVMKIKVLRSWCRQILKGLQFLHTRTPPIIHRDLKCDNIFITGPTGSVKIGDLGLATLKRASFAKSVIGTPEFMAPEMYEEKYDESVDVYAFGMCMLEMATSEYPYSECQNAAQIYRRVTSGVKPASFDKVAIPEVKEIIEGCIRQNKDERYSIKDLLNHAFFQEETGVRVELAEEDDGEKIAIKLWLRIEDIKKLKGKYKDNEAIEFSFDLERDVPEDVAQEMVESGYVCEGDHKTMAKAIKDRVSLIKRKREQRQLVREEQEKKKQEESSLKQQVEQSSASQTGIKQLPSASTGIPTASTTSASVSTQVEPEEPEADQHQQLQYQQPSISVLSDGTVDSGQGSSVFTESRVSSQQTVSYGSQHEQAHSTGTVPGHIPSTVQAQSQPHGVYPPSSVAQGQSQGQPSSSSLTGVSSSQPIQHPQQQQGIQQTAPPQQTVQYSLSQTSTSSEATTAQPVSQPQAPQVLPQVSAGKQLPVSQPVPTIQGEPQIPVATQPSVVPVHSGAHFLPVGQPLPTPLLPQYPVSQIPISTPHVSTAQTGFSSLPITMAAGITQPLLTLASSATTAAIPGVSTVVPSQLPTLLQPVTQLPSQVHPQLLQPAVQSMGIPANLGQAAEVPLSSGDVLYQGFPPRLPPQYPGDSNIAPSSNVASVCIHSTVLXPIPSA

SEQ ID NO: 129 - DNA, 6510 bp, Homo Sapiens
  CDS (1)...(6510)
atggacaaggacagccgtggggcggccgcgaccactaccaccactgagcaccgcttcttccgccggagcgtcatctgcgactccaatgccactgcactggagcttcccggccttcctctttccctgccccagcccagcatccccgcggctgtcccgcagagtgctccaccggagccccaccgggaagagaccgtgaccgccaccgccacttcccaggtagcccagcagcctccagccgctgccgcccctggggaacaggccgtcgcgggccctgccccctcgactgtccccagcagtaccagcaaagaccgcccagtgtcccagcctagccttgtggggagcaaagaggagccgccgccggcgagaagtggcagcggcggcggcagcgccaaggagccacaggaggaacggagccagcagcaggatgatatcgaagagctggagaccaaggccgtgggaatgtctaacgatggccgctttctcaagtttgacatcgaaatcggcagaggctcctttaagacggtctacaaaggtctggacactgaaaccaccgtggaagtcgcctggtgtgaactgcaggatcgaaaattaacaaagtctgagaggcagagatttaaagaagaagctgaaatgttaaaaggtcttcagcatcccaatattgttagattttatgattcctgggaatccacagtaaaaggaaagaagtgcattgttttggtgactgaacttatgacgtctggaacacttaaaacgtatctgaaaaggtttaaagtgatgaagatcaaagttctaagaagctggtgccgtcagatccttaaaggtcttcagtttcttcatactcgaactccacctatcattcaccgcgatcttaaatgtgacaacatctttatcaccggccctactggctcagtcaagattggagacctcggtctggcaaccctgaagcgggcttcttttgccaagagtgtgataggtaccccagagttcatggcccctgagatgtatgaggagaaatatgatgaatccgttgacgtttatgcttttgggatgtgcatgcttgagatggctacatctgaatatccttactcggagtgccaaaatgctgcacagatctaccgtcgcgtgaccagtggggtgaagccagccagttttgacaaagtagcaattcctgaagtgaaggaaattattgaaggatgcatacgacaaaacaaagatgaaagatattccatcaaagaccttttgaaccatgccttcttccaagaggaaacaggagtacgggtagaattagcagaagaagatgatggagaaaaaatagccataaaattatggctacgtattgaagatattaagaaattaaagggaaaatacaaagataatgaagctattgagttttcttttgatttagagagagatgtcccagaagatgttgcacaagaaatggtagagtctgggtatgtctgtgaaggtgatcacaagaccatggctaaagctatcaaagacagagtatcattaattaagaggaaacgagagcagcggcagttggtacgggaggagcaagaaaaaaaaaagcaggaagagagcagtctcaaacagcaggtagaacaatccagtgcttcccagacaggaatcaagcagctcccttctgctagcaccggcatacctactgcttctaccacttcagcttcagtttctacacaagtagaacctgaagaacctgaggcagatcaacatcaacaactacagtaccagcaacccagtatatctgtgttatctgatgggacggttgacagtggtcagggatcctctgtcttcacagaatctcgagtgagcagccaacagacagtttcatatggttcccaacatgaacaggcacattctacaggcacagtcccagggcatataccttctactgtccaagcacagtctcagccccatggggtatatccaccctcaagtgtggcacaggggcagagccagggtcagccatcctcaagtagcttaacaggggtttcatcttcccaacccatacaacatcctcagcagcagcagggaatacagcagacagcccctcctcaacagacagtgcagtattcactttcacagacatcaacctccagtgaggccactactgcacagccagtgagtcagcctcaagctccacaagtcttgcctcaagtatcagctggaaaacagggcttcccacctcgactgccaccacagtacccaggagattcaaatattgctccctcttccaacgtggcttctgtttgcatccattctacagtcctawcccctcccatgccgacagaagtactggctacacctgggtactttcccacagtggtgcagccttatgtggaatcaaatcttttagttcctatgggtggtgtaggaggacaggttcaagtgtcccagccaggagggagtttagcacaagcccccactacatcctcccagcaagcagttttggagagtactcagggagtctctcaggttgctcctgcagagccagttgcagtagcacagccccaagctacccagccgaccactttggcttcctctgtagacagtgcacattcagatgttgcttcaggtatgagtgatggcaatgagaacgtcccatcttccagtggaaggcatgaaggaagaactacaaaacggcattaccgaaaatctgtaaggagtcgctctcgacatgaaaaaacttcacgcccaaaattaagaattttgaatgtttcaaataaaggagaccgagtagtagaatgtcaattagagactcataataggaaaatggttacattcaaatttgacctagatggtgacaaccccgaggagatagcaacaattatggtgaacaatgactttattctagcaatagagagagagtcgtttgtggatcaagtgcgagaaattattgaaaaagctgatgaaatgctcagtgaggatgtcagtgtggaaccagagggtgatcagggattggagagtctacaaggaaaggatgactatggcttttcaggttctcagaaattggaaggagagttcaaacaaccaattcctgcgtcttccatgccacagcaaataggcattcctaccagttctttaactcaagttgttcattctgcgggaaggcggtttatagtgagtcctgtgccagaaagccgattacgagaatcaaaagttttccccagtgaaataacagatacagttgctgcctctacagctcagagccctggaatgaacttgtctcactctgcatcatcccttagtctacaacaggccttttctgaacttagacgtgcccaaatgacagaaggacccaayacagcacctccaaactttagtcatacaggaccaacatttccagtagtacctcctttcttaagtagcattgctggagtcccaaccacagcagcagccacagcaccagtccctgcaacaagcagccctcctaatgacatttccacatcagtaattcagtctgaggttacagtgcccactgaagaggggattgctggagttgccaccagcacaggtgtggtaacttcaggtggtctccccataccacctgtgtctgaatcaccagtactttccagcgtagtttcaagtatcacaatacctgcagttgtctcaatatctactacatccccgtcacttcaagtccccacatccacatctgagatcgttgtttctagtacagcactgtatccttcagtaacagtttcagcaacttcagcctctgcagggggcagtactgctaccccaggtcctaagcctccagctgtagtatctcagcaggcagcaggcagcactactgtgggagccacattaacatcagtttctaccaccacttcattcccaagcacagcttcacagctgtccattcagcttagcagcagtacttctactcctactttagctgaaaccgtggtagttagcgcacactcactagataagacatctcatagcagtacaactggattggctttctccctctctgcaccatcttcctcttcctctcctggagcaggagtgtctagttatatttctcagcctggtgggctgcatcctttggtcattccatcagtgatagcttctactcctattcttccccaagcagcaggacctacttctacacctttattaccccaagtacctagtatcccacccttggtacagcctgttgccaatgtgcctgctgtacagcagacactaattcatagtcagcctcaaccagctttgcttcccaaccagccccatactcattgtcctgaagtagattctgatacacaacccaaagctcctggaattgatgacataaagactctagaagaaaagctgcggtctctgttcagtgaacacagctcatctggagctcagcatgcctctgtctcactggagacctcactagtcatagagagcactgtcacaccaggcatcccaactactgctgttgcaccaagcaaactcctgacttctaccacaagtacttgcttaccaccaaccaatttaccactaggaacagttgctttgccagttacaccagtggtcacacctgggcaagtttctaccccagtcagcactactacatcaggagtgaaacctggaactgctccctccaagccacctctaactaaggctccggtgctgccagtgggtactgaacttccagcaggtactctacccagcgagcagctgccaccttttccaggaccttctctaacccagtcccagcaacctctagaggatcttgatgctcaattgagaagaacacttagtccagagatkatcacagtgacttctgcggttggtcctgtgtccatggcggctccaacagcaatcacagaagcaggaacacagcctcagaagggtgtttctcaagtcaaagaaggccctgtcctagcaactagttcaggagctggtgtttttaagatgggacgatttcaggtttctgttgcagcagacggtgcccagaaagagggtaaaaataagtcagaagatgcaaagtctgttcattttgaatccagcacctcagagtcctcagtgctatcaagtagtagtccagagagtaccttggtgaaaccagagccgaatggcataaccatccctggtatctcttcagatgtgccagagagtgcccacaaaactactgcctcagaggcaaagtcagacactgggcagcctaccaaggttggacgttttcaggtgacaactacagcaaacaaagtgggtcgtttctctgtatcaaaaactgaggacaagatcactgacacaaagaaagaaggaccagtggcatctcctccttttatggatttggaacaagctgttcttcctgctgtgataccaaagaaagagaagcctgaactgtcagagccttcacatctaaatgggccgtcttctgacccggaggccgcttttttaagtagggatgtggatgatggttccggtagtccacactcgccccatcagctgagctcaaagagccttcctagccagaatctaagtcaaagccttagtaattcatttaactcctcttacatgagtagcgacaatgagtcagatatcgaagatgaagacttaaagttagagctgcgacgactacgagataaacatctcaaagagattcaggacctgcagagtcgccagaagcatgaaattgaatctttgtataccaaactgggcaaggtgccccctgctgttattattcccccagctgctcccctttcagggagaagacgacgacccactaaaagcaaaggcagcaaatctagtcgaagcagttccttggggaataaaagcccccagctttcaggtaacctgtctggtcagagtgcagcttcagtcttgcacccccagcagaccctccaccctcctggcaacatcccagagtccgggcagaatcagctgttacagccccttaagccatctccctccagtgacaacctctattcagccttcaccagtgatggtgccatttcagtaccaagcctttctgctccaggtcaaggaaccagcagcacaaacactgttggggcaacagtgaacagccaagccgcccaagctcagcctcctgccatgacgtccagcaggaagggcacattcacagatgacttgcacaagttggtagacaattgggcccgagatgccatgaatctctcaggcaggagaggaagcaaagggcacatgaattatgagggccctggaatggcaaggaagttctctgcacctgggcaactgtgcatctccatgacctcgaacctgggtggctctgcccccatctctgcagcatcagctacctctctaggtcacttcaccaagtctatgtgccccccacagcagtatggctttccagctaccccatttggcgctcaatggagtgggacgggtggcccagcaccacagccacttggccagttccaacctgtgggaactgcctccttgcagaatttcaacatcagcaatttgcagaaatccatcagcaaccccccaggctccaacctgcggaccacttag

SEQ ID NO: 130 - protein, 2169 aa, Homo Sapiens
  VARIANT 764, 1595: Xaa = Any Amino Acid
MDKDSRGAAATTTTTEHRFFRRSVICDSNATALELPGLPLSLPQPSIPAAVPQSAPPEPHREETVTATATSQVAQQPPAAAAPGEQAVAGPAPSTVPSSTSKDRPVSQPSLVGSKEEPPPARSGSGGGSAKEPQEERSQQQDDIEELETKAVGMSNDGRFLKFDIEIGRGSFKTVYKGLDTETTVEVAWCELQDRKLTKSERQRFKEEAEMLKGLQHPNIVRFYDSWESTVKGKKCIVLVTELMTSGTLKTYLKRFKVMKIKVLRSWCRQILKGLQFLHTRTPPIIHRDLKCDNIFITGPTGSVKIGDLGLATLKRASFAKSVIGTPEFMAPEMYEEKYDESVDVYAFGMCMLEMATSEYPYSECQNAAQIYRRVTSGVKPASFDKVAIPEVKEIIEGCIRQNKDERYSIKDLLNHAFFQEETGVRVELAEEDDGEKIAIKLWLRIEDIKKLKGKYKDNEAIEFSFDLERDVPEDVAQEMVESGYVCEGDHKTMAKAIKDRVSLIKRKREQRQLVREEQEKKKQEESSLKQQVEQSSASQTGIKQLPSASTGIPTASTTSASVSTQVEPEEPEADQHQQLQYQQPSISVLSDGTVDSGQGSSVFTESRVSSQQTVSYGSQHEQAHSTGTVPGHIPSTVQAQSQPHGVYPPSSVAQGQSQGQPSSSSLTGVSSSQPIQHPQQQQGIQQTAPPQQTVQYSLSQTSTSSEATTAQPVSQPQAPQVLPQVSAGKQGFPPRLPPQYPGDSNIAPSSNVASVCIHSTVLXPPMPTEVLATPGYFPTVVQPYVESNLLVPMGGVGGQVQVSQPGGSLAQAPTTSSQQAVLESTQGVSQVAPAEPVAVAQPQATQPTTLASSVDSAHSDVASGMSDGNENVPSSSGRHEGRTTKRHYRKSVRSRSRHEKTSRPKLRILNVSNKGDRVVECQLETHNRKMVTFKFDLDGDNPEEIATIMVNNDFILAIERESFVDQVREIIEKADEMLSEDVSVEPEGDQGLESLQGKDDYGFSGSQKLEGEFKQPIPASSMPQQIGIPTSSLTQVVHSAGRRFIVSPVPESRLRESKVFPSEITDTVAASTAQSPGMNLSHSASSLSLQQAFSELRRAQMTEGPNTAPPNFSHTGPTFPVVPPFLSSIAGVPTTAAATAPVPATSSPPNDISTSVIQSEVTVPTEEGIAGVATSTGVVTSGGLPIPPVSESPVLSSVVSSITIPAVVSISTTSPSLQVPTSTSEIVVSSTALYPSVTVSATSASAGGSTATPGPKPPAVVSQQAAGSTTVGATLTSVSTTTSFPSTASQLSIQLSSSTSTPTLAETVVVSAHSLDKTSHSSTTGLAFSLSAPSSSSSPGAGVSSYISQPGGLHPLVIPSVIASTPILPQAAGPTSTPLLPQVPSIPPLVQPVANVPAVQQTLIHSQPQPALLPNQPHTHCPEVDSDTQPKAPGIDDIKTLEEKLRSLFSEHSSSGAQHASVSLETSLVIESTVTPGIPTTAVAPSKLLTSTTSTCLPPTNLPLGTVALPVTPVVTPGQVSTPVSTTTSGVKPGTAPSKPPLTKAPVLPVGTELPAGTLPSEQLPPFPGPSLTQSQQPLEDLDAQLRRTLSPEXITVTSAVGPVSMAAPTAITEAGTQPQKGVSQVKEGPVLATSSGAGVFKMGRFQVSVAADGAQKEGKNKSEDAKSVHFESSTSESSVLSSSSPESTLVKPEPNGITIPGISSDVPESAHKTTASEAKSDTGQPTKVGRFQVTTTANKVGRFSVSKTEDKITDTKKEGPVASPPFMDLEQAVLPAVIPKKEKPELSEPSHLNGPSSDPEAAFLSRDVDDGSGSPHSPHQLSSKSLPSQNLSQSLSNSFNSSYMSSDNESDIEDEDLKLELRRLRDKHLKEIQDLQSRQKHEIESLYTKLGKVPPAVIIPPAAPLSGRRRRPTKSKGSKSSRSSSLGNKSPQLSGNLSGQSAASVLHPQQTLHPPGNIPESGQNQLLQPLKPSPSSDNLYSAFTSDGAISVPSLSAPGQGTSSTNTVGATVNSQAAQAQPPAMTSSRKGTFTDDLHKLVDNWARDAMNLSGRRGSKGHMNYEGPGMARKFSAPGQLCISMTSNLGGSAPISAASATSLGHFTKSMCPPQQYGFPATPFGAQWSGTGGPAPQPLGQFQPVGTASLQNFNISNLQKSISNPPGSNLRTT

SEQ ID NO: 131 - DNA, 6099 bp, Homo Sapiens
  CDS (1)...(6099)
atggacaaggacagccgtggggcggccgcgaccactaccaccactgagcaccgcttcttccgccggagcgtcatctgcgactccaatgccactgcactggagcttcccggccttcctctttccctgccccagcccagcatccccgcggctgtcccgcagagtgctccaccggagccccaccgggaagagaccgtgaccgccaccgccacttcccaggtagcccagcagcctccagccgctgccgcccctggggaacaggccgtcgcgggccctgccccctcgactgtccccagcagtaccagcaaagaccgcccagtgtcccagcctagccttgtggggagcaaagaggagccgccgccggcgagaagtggcagcggcggcggcagcgccaaggagccacaggaggaacggagccagcagcaggatgatatcgaagagctggagaccaaggccgtgggaatgtctaacgatggccgctttctcaagtttgacatcgaaatcggcagaggctcctttaagacggtctacaaaggtctggacactgaaaccaccgtggaagtcgcctggtgtgaactgcaggatcgaaaattaacaaagtctgagaggcagagatttaaagaagaagctgaaatgttaaaaggtcttcagcatcccaatattgttagattttatgattcctgggaatccacagtaaaaggaaagaagtgcattgttttggtgactgaacttatgacgtctggaacacttaaaacgtatctgaaaaggtttaaagtgatgaagatcaaagttctaagaagctggtgccgtcagatccttaaaggtcttcagtttcttcatactcgaactccacctatcattcaccgcgatcttaaatgtgacaacatctttatcaccggccctactggctcagtcaagattggagacctcggtctggcaaccctgaagcgggcttcttttgccaagagtgtgataggtaccccagagttcatggcccctgagatgtatgaggagaaatatgatgaatccgttgacgtttatgcttttgggatgtgcatgcttgagatggctacatctgaatatccttactcggagtgccaaaatgctgcacagatctaccgtcgcgtgaccagtggggtgaagccagccagttttgacaaagtagcaattcctgaagtgaaggaaattattgaaggatgcatacgacaaaacaaagatgaaagatattccatcaaagaccttttgaaccatgccttcttccaagaggaaacaggagtacgggtagaattagcagaagaagatgatggagaaaaaatagccataaaattatggctacgtattgaagatattaagaaattaaagggaaaatacaaagataatgaagctattgagttttcttttgatttagagagagatgtcccagaagatgttgcacaagaaatggtagagtctgggtatgtctgtgaaggtgatcacaagaccatggctaaagctatcaaagacagagtatcattaattaagaggaaacgagagcagcggcagttggtacgggaggagcaagaaaaaaaaaagcaggaagagagcagtctcaaacagcaggtagaacaatccagtgcttcccagacaggaatcaagcagctcccttctgctagcaccggcatacctactgcttctaccacttcagcttcagtttctacacaagtagaacctgaagaacctgaggcagatcaacatcaacaactacagtaccagcaacccagtatatctgtgttatctgatgggacggttgacagtggtcagggatcctctgtcttcacagaatctcgagtgagcagccaacagacagtttcatatggttcccaacatgaacaggcacattctacaggcacagtcccagggcatataccttctactgtccaagcacagtctcagccccatggggtatatccaccctcaagtgtggcacaggggcagagccagggtcagccatcctcaagtagcttaacaggggtttcatcttcccaacccatacaacatcctcagcagcagcagggaatacagcagacagcccctcctcaacagacagtgcagtattcactttcacagacatcaacctccagtgaggccactactgcacagccagtgagtcagcctcaagctccacaagtcttgcctcaagtatcagctggaaaacagggcttcccacctcgactgccaccacagtacccaggagattcaaatattgctccctcttccaacgtggcttctgtttgcatccattctacagtcctawcccctcccatgccgacagaagtactggctacacctgggtactttcccacagtggtgcagccttatgtggaatcaaatcttttagttcctatgggtggtgtaggaggacaggttcaagtgtcccagccaggagggagtttagcacaagcccccactacatcctcccagcaagcagttttggagagtactcagggagtctctcaggttgctcctgcagagccagttgcagtagcacagccccaagctacccagccgaccactttggcttcctctgtagacagtgcacattcagatgttgcttcaggtatgagtgatggcaatgagaacgtcccatcttccagtggaaggcatgaaggaagaactacaaaacggcattaccgaaaatctgtaaggagtcgctctcgacatgaaaaaacttcacgcccaaaattaagaattttgaatgtttcaaataaaggagaccgagtagtagaatgtcaattagagactcataataggaaaatggttacattcaaatttgacctagatggtgacaaccccgaggagatagcaacaattatggtgaacaatgactttattctagcaatagagagagagtcgtttgtggatcaagtgcgagaaattattgaaaaagctgatgaaatgctcagtgaggatgtcagtgtggaaccagagggtgatcagggattggagagtctacaaggaaaggatgactatggcttttcaggttctcagaaattggaaggagagttcaaacaaccaattcctgcgtcttccatgccacagcaaataggcattcctaccagttctttaactcaagttgttcattctgcgggaaggcggtttatagtgagtcctgtgccagaaagccgattacgagaatcaaaagttttccccagtgaaataacagatacagttgctgcctctacagctcagagccctggaatgaacttgtctcactctgcatcatcccttagtctacaacaggccttttctgaacttagacgtgcccaaatgacagaaggacccaayacagcacctccaaactttagtcatacaggaccaacatttccagtagtacctcctttcttaagtagcattgctggagtcccaaccacagcagcagccacagcaccagtccctgcaacaagcagccctcctaatgacatttccacatcagtaattcagtctgaggttacagtgcccactgaagaggggattgctggagttgccaccagcacaggtgtggtaacttcaggtggtctccccataccacctgtgtctgaatcaccagtactttccagcgtagtttcaagtatcacaatacctgcagttgtctcaatatctactacatccccgtcacttcaagtccccacatccacatctgagatcgttgtttctagtacagcactgtatccttcagtaacagtttcagcaacttcagcctctgcagggggcagtactgctaccccaggtcctaagcctccagctgtagtatctcagcaggcagcaggcagcactactgtgggagccacattaacatcagtttctaccaccacttcattcccaagcacagcttcacagctgtccattcagcttagcagcagtacttctactcctactttagctgaaaccgtggtagttagcgcacactcactagataagacatctcatagcagtacaactggattggctttctccctctctgcaccatcttcctcttcctctcctggagcaggagtgtctagttatatttctcagcctggtgggctgcatcctttggtcattccatcagtgatagcttctactcctattcttccccaagcagcaggacctacttctacacctttattaccccaagtacctagtatcccacccttggtacagcctgttgccaatgtgcctgctgtacagcagacactaattcatagtcagcctcaaccagctttgcttcccaaccagccccatactcattgtcctgaagtagattctgatacacaacccaaagctcctggaattgatgacataaagactctagaagaaaagctgcggtctctgttcagtgaacacagctcatctggagctcagcatgcctctgtctcactggagacctcactagtcatagagagcactgtcacaccaggcatcccaactactgctgttgcaccaagcaaactcctgacttctaccacaagtacttgcttaccaccaaccaatttaccactaggaacagttgctttgccagttacaccagtggtcacacctgggcaagtttctaccccagtcagcactactacatcaggagtgaaacctggaactgctccctccaagccacctctaactaaggctccggtgctgccagtgggtactgaacttccagcaggtactctacccagcgagcagctgccaccttttccaggaccttctctaacccagtcccagcaacctctagaggatcttgatgctcaattgagaagaacacttagtccagagatkatcacagtgacttctgcggttggtcctgtgtccatggcggctccaacagcaatcacagaagcaggaacacagcctcagaagggtgtttctcaagtcaaagaaggccctgtcctagcaactagttcaggagctggtgtttttaagatgggacgatttcaggtttctgttgcagcagacggtgcccagaaagagggtaaaaataagtcagaagatgcaaagtctgttcattttgaatccagcacctcagagtcctcagtgctatcaagtagtagtccagagagtaccttggtgaaaccagagccgaatggcataaccatccctggtatctcttcagatgtgccagagagtgcccacaaaactactgcctcagaggcaaagtcagacactgggcagcctaccaaggttggacgttttcaggtgacaactacagcaaacaaagtgggtcgtttctctgtatcaaaaactgaggacaagatcactgacacaaagaaagaaggaccagtggcatctcctccttttatggatttggaacaagctgttcttcctgctgtgataccaaagaaagagaagcctgaactgtcagagccttcacatctaaatgggccgtcttctgacccggaggccgcttttttaagtagggatgtggatgatggttccggtagtccacactcgccccatcagctgagctcaaagagccttcctagccagaatctaagtcaaagccttagtaattcatttaactcctcttacatgagtagcgacaatgagtcagatatcgaagatgaagacttaaagttagagctgcgacgactacgagataaacatctcaaagagattcaggacctgcagagtcgccagaagcatgaaattgaatctttgtataccaaactgggcaaggtgccccctgctgttattattcccccagctgctcccctttcagggagaagacgacgacccactaaaagcaaaggcagcaaatctagtcgaagcagttccttggggaataaaagcccccagctttcaggtaacctgtctggtcagagtgcagcttcagtcttgcacccccagcagaccctccaccctcctggcaacatcccagagtccgggcagaatcagctgttacagccccttaagccatctccctccagtgacaacctctattcagccttcaccagtgatggtgccatttcagtaccaagcctttctgctccaggtcaaggaataaagcaaccatcatcgtccaaaaacaataaaatggagatgttgccatacctgggacaaaagcctgttaaggcgggttgggagactagctga

SEQ ID NO: 132 - protein, 2032 aa, Homo Sapiens
  VARIANT 764, 1595: Xaa = Any Amino Acid
MDKDSRGAAATTTTTEHRFFRRSVICDSNATALELPGLPLSLPQPSIPAAVPQSAPPEPHREETVTATATSQVAQQPPAAAAPGEQAVAGPAPSTVPSSTSKDRPVSQPSLVGSKEEPPPARSGSGGGSAKEPQEERSQQQDDIEELETKAVGMSNDGRFLKFDIEIGRGSFKTVYKGLDTETTVEVAWCELQDRKLTKSERQRFKEEAEMLKGLQHPNIVRFYDSWESTVKGKKCIVLVTELMTSGTLKTYLKRFKVMKIKVLRSWCRQILKGLQFLHTRTPPIIHRDLKCDNIFITGPTGSVKIGDLGLATLKRASFAKSVIGTPEFMAPEMYEEKYDESVDVYAFGMCMLEMATSEYPYSECQNAAQIYRRVTSGVKPASFDKVAIPEVKEIIEGCIRQNKDERYSIKDLLNHAFFQEETGVRVELAEEDDGEKIAIKLWLRIEDIKKLKGKYKDNEAIEFSFDLERDVPEDVAQEMVESGYVCEGDHKTMAKAIKDRVSLIKRKREQRQLVREEQEKKKQEESSLKQQVEQSSASQTGIKQLPSASTGIPTASTTSASVSTQVEPEEPEADQHQQLQYQQPSISVLSDGTVDSGQGSSVFTESRVSSQQTVSYGSQHEQAHSTGTVPGHIPSTVQAQSQPHGVYPPSSVAQGQSQGQPSSSSLTGVSSSQPIQHPQQQQGIQQTAPPQQTVQYSLSQTSTSSEATTAQPVSQPQAPQVLPQVSAGKQGFPPRLPPQYPGDSNIAPSSNVASVCIHSTVLXPPMPTEVLATPGYFPTVVQPYVESNLLVPMGGVGGQVQVSQPGGSLAQAPTTSSQQAVLESTQGVSQVAPAEPVAVAQPQATQPTTLASSVDSAHSDVASGMSDGNENVPSSSGRHEGRTTKRHYRKSVRSRSRHEKTSRPKLRILNVSNKGDRVVECQLETHNRKMVTFKFDLDGDNPEEIATIMVNNDFILAIERESFVDQVREIIEKADEMLSEDVSVEPEGDQGLESLQGKDDYGFSGSQKLEGEFKQPIPASSMPQQIGIPTSSLTQVVHSAGRRFIVSPVPESRLRESKVFPSEITDTVAASTAQSPGMNLSHSASSLSLQQAFSELRRAQMTEGPNTAPPNFSHTGPTFPVVPPFLSSIAGVPTTAAATAPVPATSSPPNDISTSVIQSEVTVPTEEGIAGVATSTGVVTSGGLPIPPVSESPVLSSVVSSITIPAVVSISTTSPSLQVPTSTSEIVVSSTALYPSVTVSATSASAGGSTATPGPKPPAVVSQQAAGSTTVGATLTSVSTTTSFPSTASQLSIQLSSSTSTPTLAETVVVSAHSLDKTSHSSTTGLAFSLSAPSSSSSPGAGVSSYISQPGGLHPLVIPSVIASTPILPQAAGPTSTPLLPQVPSIPPLVQPVANVPAVQQTLIHSQPQPALLPNQPHTHCPEVDSDTQPKAPGIDDIKTLEEKLRSLFSEHSSSGAQHASVSLETSLVIESTVTPGIPTTAVAPSKLLTSTTSTCLPPTNLPLGTVALPVTPVVTPGQVSTPVSTTTSGVKPGTAPSKPPLTKAPVLPVGTELPAGTLPSEQLPPFPGPSLTQSQQPLEDLDAQLRRTLSPEXITVTSAVGPVSMAAPTAITEAGTQPQKGVSQVKEGPVLATSSGAGVFKMGRFQVSVAADGAQKEGKNKSEDAKSVHFESSTSESSVLSSSSPESTLVKPEPNGITIPGISSDVPESAHKTTASEAKSDTGQPTKVGRFQVTTTANKVGRFSVSKTEDKITDTKKEGPVASPPFMDLEQAVLPAVIPKKEKPELSEPSHLNGPSSDPEAAFLSRDVDDGSGSPHSPHQLSSKSLPSQNLSQSLSNSFNSSYMSSDNESDIEDEDLKLELRRLRDKHLKEIQDLQSRQKHEIESLYTKLGKVPPAVIIPPAAPLSGRRRRPTKSKGSKSSRSSSLGNKSPQLSGNLSGQSAASVLHPQQTLHPPGNIPESGQNQLLQPLKPSPSSDNLYSAFTSDGAISVPSLSAPGQGIKQPSSSKNNKMEMLPYLGQKPVKAGWETS

SEQ ID NO: 133 - DNA, 2310 bp, Homo Sapiens
  CDS (1)...(2310)
atggacaaggacagccgtggggcggccgcgaccactaccaccactgagcaccgcttcttccgccggagcgtcatctgcgactccaatgccactgcactggagcttcccggccttcctctttccctgccccagcccagcatccccgcggctgtcccgcagagtgctccaccggagccccaccgggaagagaccgtgaccgccaccgccacttcccaggtagcccagcagcctccagccgctgccgcccctggggaacaggccgtcgcgggccctgccccctcgactgtccccagcagtaccagcaaagaccgcccagtgtcccagcctagccttgtggggagcaaagaggagccgccgccggcgagaagtggcagcggcggcggcagcgccaaggagccacaggaggaacggagccagcagcaggatgatatcgaagagctggagaccaaggccgtgggaatgtctaacgatggccgctttctcaagtttgacatcgaaatcggcagaggctcctttaagacggtctacaaaggtctggacactgaaaccaccgtggaagtcgcctggtgtgaactgcaggatcgaaaattaacaaagtctgagaggcagagatttaaagaagaagctgaaatgttaaaaggtcttcagcatcccaatattgttagattttatgattcctgggaatccacagtaaaaggaaagaagtgcattgttttggtgactgaacttatgacgtctggaacacttaaaacgtatctgaaaaggtttaaagtgatgaagatcaaagttctaagaagctggtgccgtcagatccttaaaggtcttcagtttcttcatactcgaactccacctatcattcaccgcgatcttaaatgtgacaacatctttatcaccggccctactggctcagtcaagattggagacctcggtctggcaaccctgaagcgggcttcttttgccaagagtgtgataggtaccccagagttcatggcccctgagatgtatgaggagaaatatgatgaatccgttgacgtttatgcttttgggatgtgcatgcttgagatggctacatctgaatatccttactcggagtgccaaaatgctgcacagatctaccgtcgcgtgaccagtggggtgaagccagccagttttgacaaagtagcaattcctgaagtgaaggaaattattgaaggatgcatacgacaaaacaaagatgaaagatattccatcaaagaccttttgaaccatgccttcttccaagaggaaacaggagtacgggtagaattagcagaagaagatgatggagaaaaaatagccataaaattatggctacgtattgaagatattaagaaattaaagggaaaatacaaagataatgaagctattgagttttcttttgatttagagagagatgtcccagaagatgttgcacaagaaatggtagagtctgggtatgtctgtgaaggtgatcacaagaccatggctaaagctatcaaagacagagtatcattaattaagaggaaacgagagcagcggcagttggtacgggaggagcaagaaaaaaaaaagcaggaagagagcagtctcaaacagcaggtagaacaatccagtgcttcccagacaggaatcaagcagctcccttctgctagcaccggcatacctactgcttctaccacttcagcttcagtttctacacaagtagaacctgaagaacctgaggcagatcaacatcaacaactacagtaccagcaacccagtatatctgtgttatctgatgggacggttgacagtggtcagggatcctctgtcttcacagaatctcgagtgagcagccaacagacagtttcatatggttcccaacatgaacaggcacattctacaggcacagtcccagggcatataccttctactgtccaagcacagtctcagccccatggggtatatccaccctcaagtgtggcacaggggcagagccagggtcagccatcctcaagtagcttaacaggggtttcatcttcccaacccatacaacatcctcagcagcagcagggaatacagcagacagcccctcctcaacagacagtgcagtattcactttcacagacatcaacctccagtgaggccactactgcacagccagtgagtcagcctcaagctccacaagtcttgcctcaagtatcagctggaaaacagggcttcccacctcgactgccaccacagtacccaggagattcaaatattgctccctcttccaacgtggcttctgtttgcatccattctacagtcctawcccctataccttctgcataa

SEQ ID NO: 134 - protein, 769 aa, Homo Sapiens
  VARIANT 764: Xaa = Any Amino Acid
MDKDSRGAAATTTTTEHRFFRRSVICDSNATALELPGLPLSLPQPSIPAAVPQSAPPEPHREETVTATATSQVAQQPPAAAAPGEQAVAGPAPSTVPSSTSKDRPVSQPSLVGSKEEPPPARSGSGGGSAKEPQEERSQQQDDIEELETKAVGMSNDGRFLKFDIEIGRGSFKTVYKGLDTETTVEVAWCELQDRKLTKSERQRFKEEAEMLKGLQHPNIVRFYDSWESTVKGKKCIVLVTELMTSGTLKTYLKRFKVMKIKVLRSWCRQILKGLQFLHTRTPPIIHRDLKCDNIFITGPTGSVKIGDLGLATLKRASFAKSVIGTPEFMAPEMYEEKYDESVDVYAFGMCMLEMATSEYPYSECQNAAQIYRRVTSGVKPASFDKVAIPEVKEIIEGCIRQNKDERYSIKDLLNHAFFQEETGVRVELAEEDDGEKIAIKLWLRIEDIKKLKGKYKDNEAIEFSFDLERDVPEDVAQEMVESGYVCEGDHKTMAKAIKDRVSLIKRKREQRQLVREEQEKKKQEESSLKQQVEQSSASQTGIKQLPSASTGIPTASTTSASVSTQVEPEEPEADQHQQLQYQQPSISVLSDGTVDSGQGSSVFTESRVSSQQTVSYGSQHEQAHSTGTVPGHIPSTVQAQSQPHGVYPPSSVAQGQSQGQPSSSSLTGVSSSQPIQHPQQQQGIQQTAPPQQTVQYSLSQTSTSSEATTAQPVSQPQAPQVLPQVSAGKQGFPPRLPPQYPGDSNIAPSSNVASVCIHSTVLXPIPSA

SEQ ID NO: 135 - DNA, 6231 bp, Homo Sapiens
  CDS (1)...(6231)
atggacaaggacagccgtggggcggccgcgaccactaccaccactgagcaccgcttcttccgccggagcgtcatctgcgactccaatgccactgcactggagcttcccggccttcctctttccctgccccagcccagcatccccgcggctgtcccgcagagtgctccaccggagccccaccgggaagagaccgtgaccgccaccgccacttcccaggtagcccagcagcctccagccgctgccgcccctggggaacaggccgtcgcgggccctgccccctcgactgtccccagcagtaccagcaaagaccgcccagtgtcccagcctagccttgtggggagcaaagaggagccgccgccggcgagaagtggcagcggcggcggcagcgccaaggagccacaggaggaacggagccagcagcaggatgatatcgaagagctggagaccaaggccgtgggaatgtctaacgatggccgctttctcaagtttgacatcgaaatcggcagaggctcctttaagacggtctacaaaggtctggacactgaaaccaccgtggaagtcgcctggtgtgaactgcaggatcgaaaattaacaaagtctgagaggcagagatttaaagaagaagctgaaatgttaaaaggtcttcagcatcccaatattgttagattttatgattcctgggaatccacagtaaaaggaaagaagtgcattgttttggtgactgaacttatgacgtctggaacacttaaaacgtatctgaaaaggtttaaagtgatgaagatcaaagttctaagaagctggtgccgtcagatccttaaaggtcttcagtttcttcatactcgaactccacctatcattcaccgcgatcttaaatgtgacaacatctttatcaccggccctactggctcagtcaagattggagacctcggtctggcaaccctgaagcgggcttcttttgccaagagtgtgataggtaccccagagttcatggcccctgagatgtatgaggagaaatatgatgaatccgttgacgtttatgcttttgggatgtgcatgcttgagatggctacatctgaatatccttactcggagtgccaaaatgctgcacagatctaccgtcgcgtgaccagtggggtgaagccagccagttttgacaaagtagcaattcctgaagtgaaggaaattattgaaggatgcatacgacaaaacaaagatgaaagatattccatcaaagaccttttgaaccatgccttcttccaagaggaaacaggagtacgggtagaattagcagaagaagatgatggagaaaaaatagccataaaattatggctacgtattgaagatattaagaaattaaagggaaaatacaaagataatgaagctattgagttttcttttgatttagagagagatgtcccagaagatgttgcacaagaaatggtagagtctgggtatgtctgtgaaggtgatcacaagaccatggctaaagctatcaaagacagagtatcattaattaagaggaaacgagagcagcggcagttggtacgggaggagcaagaaaaaaaaaagcaggaagagagcagtctcaaacagcaggtagaacaatccagtgcttcccagacaggaatcaagcagctcccttctgctagcaccggcatacctactgcttctaccacttcagcttcagtttctacacaagtagaacctgaagaacctgaggcagatcaacatcaacaactacagtaccagcaacccagtatatctgtgttatctgatgggacggttgacagtggtcagggatcctctgtcttcacagaatctcgagtgagcagccaacagacagtttcatatggttcccaacatgaacaggcacattctacaggcacagtcccagggcatataccttctactgtccaagcacagtctcagccccatggggtatatccaccctcaagtgtggcacaggggcagagccagggtcagccatcctcaagtagcttaacaggggtttcatcttcccaacccatacaacatcctcagcagcagcagggaatacagcagacagcccctcctcaacagacagtgcagtattcactttcacagacatcaacctccagtgaggccactactgcacagccagtgagtcagcctcaagctccacaagtcttgcctcaagtatcagctggaaaacagagtactcagggagtctctcaggttgctcctgcagagccagttgcagtagcacagccccaagctacccagccgaccactttggcttcctctgtagacagtgcacattcagatgttgcttcaggtatgagtgatggcaatgagaacgtcccatcttccagtggaaggcatgaaggaagaactacaaaacggcattaccgaaaatctgtaaggagtcgctctcgacatgaaaaaacttcacgcccaaaattaagaattttgaatgtttcaaataaaggagaccgagtagtagaatgtcaattagagactcataataggaaaatggttacattcaaatttgacctagatggtgacaaccccgaggagatagcaacaattatggtgaacaatgactttattctagcaatagagagagagtcgtttgtggatcaagtgcgagaaattattgaaaaagctgatgaaatgctcagtgaggatgtcagtgtggaaccagagggtgatcagggattggagagtctacaaggaaaggatgactatggcttttcaggttctcagaaattggaaggagagttcaaacaaccaattcctgcgtcttccatgccacagcaaataggcattcctaccagttctttaactcaagttgttcattctgcgggaaggcggtttatagtgagtcctgtgccagaaagccgattacgagaatcaaaagttttccccagtgaaataacagatacagttgctgcctctacagctcagagccctggaatgaacttgtctcactctgcatcatcccttagtctacaacaggccttttctgaacttagacgtgcccaaatgacagaaggacccaayacagcacctccaaactttagtcatacaggaccaacatttccagtagtacctcctttcttaagtagcattgctggagtcccaaccacagcagcagccacagcaccagtccctgcaacaagcagccctcctaatgacatttccacatcagtaattcagtctgaggttacagtgcccactgaagaggggattgctggagttgccaccagcacaggtgtggtaacttcaggtggtctccccataccacctgtgtctgaatcaccagtactttccagcgtagtttcaagtatcacaatacctgcagttgtctcaatatctactacatccccgtcacttcaagtccccacatccacatctgagatcgttgtttctagtacagcactgtatccttcagtaacagtttcagcaacttcagcctctgcagggggcagtactgctaccccaggtcctaagcctccagctgtagtatctcagcaggcagcaggcagcactactgtgggagccacattaacatcagtttctaccaccacttcattcccaagcacagcttcacagctgtccattcagcttagcagcagtacttctactcctactttagctgaaaccgtggtagttagcgcacactcactagataagacatctcatagcagtacaactggattggctttctccctctctgcaccatcttcctcttcctctcctggagcaggagtgtctagttatatttctcagcctggtgggctgcatcctttggtcattccatcagtgatagcttctactcctattcttccccaagcagcaggacctacttctacacctttattaccccaagtacctagtatcccacccttggtacagcctgttgccaatgtgcctgctgtacagcagacactaattcatagtcagcctcaaccagctttgcttcccaaccagccccatactcattgtcctgaagtagattctgatacacaacccaaagctcctggaattgatgacataaagactctagaagaaaagctgcggtctctgttcagtgaacacagctcatctggagctcagcatgcctctgtctcactggagacctcactagtcatagagagcactgtcacaccaggcatcccaactactgctgttgcaccaagcaaactcctgacttctaccacaagtacttgcttaccaccaaccaatttaccactaggaacagttgctttgccagttacaccagtggtcacacctgggcaagtttctaccccagtcagcactactacatcaggagtgaaacctggaactgctccctccaagccacctctaactaaggctccggtgctgccagtgggtactgaacttccagcaggtactctacccagcgagcagctgccaccttttccaggaccttctctaacccagtcccagcaacctctagaggatcttgatgctcaattgagaagaacacttagtccagagatkatcacagtgacttctgcggttggtcctgtgtccatggcggctccaacagcaatcacagaagcaggaacacagcctcagaagggtgtttctcaagtcaaagaaggccctgtcctagcaactagttcaggagctggtgtttttaagatgggacgatttcaggtttctgttgcagcagacggtgcccagaaagagggtaaaaataagtcagaagatgcaaagtctgttcattttgaatccagcacctcagagtcctcagtgctatcaagtagtagtccagagagtaccttggtgaaaccagagccgaatggcataaccatccctggtatctcttcagatgtgccagagagtgcccacaaaactactgcctcagaggcaaagtcagacactgggcagcctaccaaggttggacgttttcaggtgacaactacagcaaacaaagtgggtcgtttctctgtatcaaaaactgaggacaagatcactgacacaaagaaagaaggaccagtggcatctcctccttttatggatttggaacaagctgttcttcctgctgtgataccaaagaaagagaagcctgaactgtcagagccttcacatctaaatgggccgtcttctgacccggaggccgcttttttaagtagggatgtggatgatggttccggtagtccacactcgccccatcagctgagctcaaagagccttcctagccagaatctaagtcaaagccttagtaattcatttaactcctcttacatgagtagcgacaatgagtcagatatcgaagatgaagacttaaagttagagctgcgacgactacgagataaacatctcaaagagattcaggacctgcagagtcgccagaagcatgaaattgaatctttgtataccaaactgggcaaggtgccccctgctgttattattcccccagctgctcccctttcagggagaagacgacgacccactaaaagcaaaggcagcaaatctagtcgaagcagttccttggggaataaaagcccccagctttcaggtaacctgtctggtcagagtgcagcttcagtcttgcacccccagcagaccctccaccctcctggcaacatcccagagtccgggcagaatcagctgttacagccccttaagccatctccctccagtgacaacctctattcagccttcaccagtgatggtgccatttcagtaccaagcctttctgctccaggtcaaggaaccagcagcacaaacactgttggggcaacagtgaacagccaagccgcccaagctcagcctcctgccatgacgtccagcaggaagggcacattcacagatgacttgcacaagttggtagacaattgggcccgagatgccatgaatctctcaggcaggagaggaagcaaagggcacatgaattatgagggccctggaatggcaaggaagttctctgcacctgggcaactgtgcatctccatgacctcgaacctgggtggctctgcccccatctctgcagcatcagctacctctctaggtcacttcaccaagtctatgtgccccccacagcagtatggctttccagctaccccatttggcgctcaatggagtgggacgggtggcccagcaccacagccacttggccagttccaacctgtgggaactgcctccttgcagaatttcaacatcagcaatttgcagaaatccatcagcaaccccccaggctccaacctgcggaccacttag

SEQ ID NO: 136 - protein, 2076 aa, Homo Sapiens
  VARIANT 1502: Xaa = Any Amino Acid
MDKDSRGAAATTTTTEHRFFRRSVICDSNATALELPGLPLSLPQPSIPAAVPQSAPPEPHREETVTATATSQVAQQPPAAAAPGEQAVAGPAPSTVPSSTSKDRPVSQPSLVGSKEEPPPARSGSGGGSAKEPQEERSQQQDDIEELETKAVGMSNDGRFLKFDIEIGRGSFKTVYKGLDTETTVEVAWCELQDRKLTKSERQRFKEEAEMLKGLQHPNIVRFYDSWESTVKGKKCIVLVTELMTSGTLKTYLKRFKVMKIKVLRSWCRQILKGLQFLHTRTPPIIHRDLKCDNIFITGPTGSVKIGDLGLATLKRASFAKSVIGTPEFMAPEMYEEKYDESVDVYAFGMCMLEMATSEYPYSECQNAAQIYRRVTSGVKPASFDKVAIPEVKEIIEGCIRQNKDERYSIKDLLNHAFFQEETGVRVELAEEDDGEKIAIKLWLRIEDIKKLKGKYKDNEAIEFSFDLERDVPEDVAQEMVESGYVCEGDHKTMAKAIKDRVSLIKRKREQRQLVREEQEKKKQEESSLKQQVEQSSASQTGIKQLPSASTGIPTASTTSASVSTQVEPEEPEADQHQQLQYQQPSISVLSDGTVDSGQGSSVFTESRVSSQQTVSYGSQHEQAHSTGTVPGHIPSTVQAQSQPHGVYPPSSVAQGQSQGQPSSSSLTGVSSSQPIQHPQQQQGIQQTAPPQQTVQYSLSQTSTSSEATTAQPVSQPQAPQVLPQVSAGKQSTQGVSQVAPAEPVAVAQPQATQPTTLASSVDSAHSDVASGMSDGNENVPSSSGRHEGRTTKRHYRKSVRSRSRHEKTSRPKLRILNVSNKGDRVVECQLETHNRKMVTFKFDLDGDNPEEIATIMVNNDFILAIERESFVDQVREIIEKADEMLSEDVSVEPEGDQGLESLQGKDDYGFSGSQKLEGEFKQPIPASSMPQQIGIPTSSLTQVVHSAGRRFIVSPVPESRLRESKVFPSEITDTVAASTAQSPGMNLSHSASSLSLQQAFSELRRAQMTEGPNTAPPNFSHTGPTFPVVPPFLSSIAGVPTTAAATAPVPATSSPPNDISTSVIQSEVTVPTEEGIAGVATSTGVVTSGGLPIPPVSESPVLSSVVSSITIPAVVSISTTSPSLQVPTSTSEIVVSSTALYPSVTVSATSASAGGSTATPGPKPPAVVSQQAAGSTTVGATLTSVSTTTSFPSTASQLSIQLSSSTSTPTLAETVVVSAHSLDKTSHSSTTGLAFSLSAPSSSSSPGAGVSSYISQPGGLHPLVIPSVIASTPILPQAAGPTSTPLLPQVPSIPPLVQPVANVPAVQQTLIHSQPQPALLPNQPHTHCPEVDSDTQPKAPGIDDIKTLEEKLRSLFSEHSSSGAQHASVSLETSLVIESTVTPGIPTTAVAPSKLLTSTTSTCLPPTNLPLGTVALPVTPVVTPGQVSTPVSTTTSGVKPGTAPSKPPLTKAPVLPVGTELPAGTLPSEQLPPFPGPSLTQSQQPLEDLDAQLRRTLSPEXITVTSAVGPVSMAAPTAITEAGTQPQKGVSQVKEGPVLATSSGAGVFKMGRFQVSVAADGAQKEGKNKSEDAKSVHFESSTSESSVLSSSSPESTLVKPEPNGITIPGISSDVPESAHKTTASEAKSDTGQPTKVGRFQVTTTANKVGRFSVSKTEDKITDTKKEGPVASPPFMDLEQAVLPAVIPKKEKPELSEPSHLNGPSSDPEAAFLSRDVDDGSGSPHSPHQLSSKSLPSQNLSQSLSNSFNSSYMSSDNESDIEDEDLKLELRRLRDKHLKEIQDLQSRQKHEIESLYTKLGKVPPAVIIPPAAPLSGRRRRPTKSKGSKSSRSSSLGNKSPQLSGNLSGQSAASVLHPQQTLHPPGNIPESGQNQLLQPLKPSPSSDNLYSAFTSDGAISVPSLSAPGQGTSSTNTVGATVNSQAAQAQPPAMTSSRKGTFTDDLHKLVDNWARDAMNLSGRRGSKGHMNYEGPGMARKFSAPGQLCISMTSNLGGSAPISAASATSLGHFTKSMCPPQQYGFPATPFGAQWSGTGGPAPQPLGQFQPVGTASLQNFNISNLQKSISNPPGSNLRTT

SEQ ID NO: 137 - DNA, 5820 bp, Homo Sapiens
  CDS (1)...(5820)
atggacaaggacagccgtggggcggccgcgaccactaccaccactgagcaccgcttcttccgccggagcgtcatctgcgactccaatgccactgcactggagcttcccggccttcctctttccctgccccagcccagcatccccgcggctgtcccgcagagtgctccaccggagccccaccgggaagagaccgtgaccgccaccgccacttcccaggtagcccagcagcctccagccgctgccgcccctggggaacaggccgtcgcgggccctgccccctcgactgtccccagcagtaccagcaaagaccgcccagtgtcccagcctagccttgtggggagcaaagaggagccgccgccggcgagaagtggcagcggcggcggcagcgccaaggagccacaggaggaacggagccagcagcaggatgatatcgaagagctggagaccaaggccgtgggaatgtctaacgatggccgctttctcaagtttgacatcgaaatcggcagaggctcctttaagacggtctacaaaggtctggacactgaaaccaccgtggaagtcgcctggtgtgaactgcaggatcgaaaattaacaaagtctgagaggcagagatttaaagaagaagctgaaatgttaaaaggtcttcagcatcccaatattgttagattttatgattcctgggaatccacagtaaaaggaaagaagtgcattgttttggtgactgaacttatgacgtctggaacacttaaaacgtatctgaaaaggtttaaagtgatgaagatcaaagttctaagaagctggtgccgtcagatccttaaaggtcttcagtttcttcatactcgaactccacctatcattcaccgcgatcttaaatgtgacaacatctttatcaccggccctactggctcagtcaagattggagacctcggtctggcaaccctgaagcgggcttcttttgccaagagtgtgataggtaccccagagttcatggcccctgagatgtatgaggagaaatatgatgaatccgttgacgtttatgcttttgggatgtgcatgcttgagatggctacatctgaatatccttactcggagtgccaaaatgctgcacagatctaccgtcgcgtgaccagtggggtgaagccagccagttttgacaaagtagcaattcctgaagtgaaggaaattattgaaggatgcatacgacaaaacaaagatgaaagatattccatcaaagaccttttgaaccatgccttcttccaagaggaaacaggagtacgggtagaattagcagaagaagatgatggagaaaaaatagccataaaattatggctacgtattgaagatattaagaaattaaagggaaaatacaaagataatgaagctattgagttttcttttgatttagagagagatgtcccagaagatgttgcacaagaaatggtagagtctgggtatgtctgtgaaggtgatcacaagaccatggctaaagctatcaaagacagagtatcattaattaagaggaaacgagagcagcggcagttggtacgggaggagcaagaaaaaaaaaagcaggaagagagcagtctcaaacagcaggtagaacaatccagtgcttcccagacaggaatcaagcagctcccttctgctagcaccggcatacctactgcttctaccacttcagcttcagtttctacacaagtagaacctgaagaacctgaggcagatcaacatcaacaactacagtaccagcaacccagtatatctgtgttatctgatgggacggttgacagtggtcagggatcctctgtcttcacagaatctcgagtgagcagccaacagacagtttcatatggttcccaacatgaacaggcacattctacaggcacagtcccagggcatataccttctactgtccaagcacagtctcagccccatggggtatatccaccctcaagtgtggcacaggggcagagccagggtcagccatcctcaagtagcttaacaggggtttcatcttcccaacccatacaacatcctcagcagcagcagggaatacagcagacagcccctcctcaacagacagtgcagtattcactttcacagacatcaacctccagtgaggccactactgcacagccagtgagtcagcctcaagctccacaagtcttgcctcaagtatcagctggaaaacagagtactcagggagtctctcaggttgctcctgcagagccagttgcagtagcacagccccaagctacccagccgaccactttggcttcctctgtagacagtgcacattcagatgttgcttcaggtatgagtgatggcaatgagaacgtcccatcttccagtggaaggcatgaaggaagaactacaaaacggcattaccgaaaatctgtaaggagtcgctctcgacatgaaaaaacttcacgcccaaaattaagaattttgaatgtttcaaataaaggagaccgagtagtagaatgtcaattagagactcataataggaaaatggttacattcaaatttgacctagatggtgacaaccccgaggagatagcaacaattatggtgaacaatgactttattctagcaatagagagagagtcgtttgtggatcaagtgcgagaaattattgaaaaagctgatgaaatgctcagtgaggatgtcagtgtggaaccagagggtgatcagggattggagagtctacaaggaaaggatgactatggcttttcaggttctcagaaattggaaggagagttcaaacaaccaattcctgcgtcttccatgccacagcaaataggcattcctaccagttctttaactcaagttgttcattctgcgggaaggcggtttatagtgagtcctgtgccagaaagccgattacgagaatcaaaagttttccccagtgaaataacagatacagttgctgcctctacagctcagagccctggaatgaacttgtctcactctgcatcatcccttagtctacaacaggccttttctgaacttagacgtgcccaaatgacagaaggacccaayacagcacctccaaactttagtcatacaggaccaacatttccagtagtacctcctttcttaagtagcattgctggagtcccaaccacagcagcagccacagcaccagtccctgcaacaagcagccctcctaatgacatttccacatcagtaattcagtctgaggttacagtgcccactgaagaggggattgctggagttgccaccagcacaggtgtggtaacttcaggtggtctccccataccacctgtgtctgaatcaccagtactttccagcgtagtttcaagtatcacaatacctgcagttgtctcaatatctactacatccccgtcacttcaagtccccacatccacatctgagatcgttgtttctagtacagcactgtatccttcagtaacagtttcagcaacttcagcctctgcagggggcagtactgctaccccaggtcctaagcctccagctgtagtatctcagcaggcagcaggcagcactactgtgggagccacattaacatcagtttctaccaccacttcattcccaagcacagcttcacagctgtccattcagcttagcagcagtacttctactcctactttagctgaaaccgtggtagttagcgcacactcactagataagacatctcatagcagtacaactggattggctttctccctctctgcaccatcttcctcttcctctcctggagcaggagtgtctagttatatttctcagcctggtgggctgcatcctttggtcattccatcagtgatagcttctactcctattcttccccaagcagcaggacctacttctacacctttattaccccaagtacctagtatcccacccttggtacagcctgttgccaatgtgcctgctgtacagcagacactaattcatagtcagcctcaaccagctttgcttcccaaccagccccatactcattgtcctgaagtagattctgatacacaacccaaagctcctggaattgatgacataaagactctagaagaaaagctgcggtctctgttcagtgaacacagctcatctggagctcagcatgcctctgtctcactggagacctcactagtcatagagagcactgtcacaccaggcatcccaactactgctgttgcaccaagcaaactcctgacttctaccacaagtacttgcttaccaccaaccaatttaccactaggaacagttgctttgccagttacaccagtggtcacacctgggcaagtttctaccccagtcagcactactacatcaggagtgaaacctggaactgctccctccaagccacctctaactaaggctccggtgctgccagtgggtactgaacttccagcaggtactctacccagcgagcagctgccaccttttccaggaccttctctaacccagtcccagcaacctctagaggatcttgatgctcaattgagaagaacacttagtccagagatkatcacagtgacttctgcggttggtcctgtgtccatggcggctccaacagcaatcacagaagcaggaacacagcctcagaagggtgtttctcaagtcaaagaaggccctgtcctagcaactagttcaggagctggtgtttttaagatgggacgatttcaggtttctgttgcagcagacggtgcccagaaagagggtaaaaataagtcagaagatgcaaagtctgttcattttgaatccagcacctcagagtcctcagtgctatcaagtagtagtccagagagtaccttggtgaaaccagagccgaatggcataaccatccctggtatctcttcagatgtgccagagagtgcccacaaaactactgcctcagaggcaaagtcagacactgggcagcctaccaaggttggacgttttcaggtgacaactacagcaaacaaagtgggtcgtttctctgtatcaaaaactgaggacaagatcactgacacaaagaaagaaggaccagtggcatctcctccttttatggatttggaacaagctgttcttcctgctgtgataccaaagaaagagaagcctgaactgtcagagccttcacatctaaatgggccgtcttctgacccggaggccgcttttttaagtagggatgtggatgatggttccggtagtccacactcgccccatcagctgagctcaaagagccttcctagccagaatctaagtcaaagccttagtaattcatttaactcctcttacatgagtagcgacaatgagtcagatatcgaagatgaagacttaaagttagagctgcgacgactacgagataaacatctcaaagagattcaggacctgcagagtcgccagaagcatgaaattgaatctttgtataccaaactgggcaaggtgccccctgctgttattattcccccagctgctcccctttcagggagaagacgacgacccactaaaagcaaaggcagcaaatctagtcgaagcagttccttggggaataaaagcccccagctttcaggtaacctgtctggtcagagtgcagcttcagtcttgcacccccagcagaccctccaccctcctggcaacatcccagagtccgggcagaatcagctgttacagccccttaagccatctccctccagtgacaacctctattcagccttcaccagtgatggtgccatttcagtaccaagcctttctgctccaggtcaaggaataaagcaaccatcatcgtccaaaaacaataaaatggagatgttgccatacctgggacaaaagcctgttaaggcgggttgggagactagctga

SEQ ID NO: 138 - protein, 1939 aa, Homo Sapiens
  VARIANT 1502: Xaa = Any Amino Acid
MDKDSRGAAATTTTTEHRFFRRSVICDSNATALELPGLPLSLPQPSIPAAVPQSAPPEPHREETVTATATSQVAQQPPAAAAPGEQAVAGPAPSTVPSSTSKDRPVSQPSLVGSKEEPPPARSGSGGGSAKEPQEERSQQQDDIEELETKAVGMSNDGRFLKFDIEIGRGSFKTVYKGLDTETTVEVAWCELQDRKLTKSERQRFKEEAEMLKGLQHPNIVRFYDSWESTVKGKKCIVLVTELMTSGTLKTYLKRFKVMKIKVLRSWCRQILKGLQFLHTRTPPIIHRDLKCDNIFITGPTGSVKIGDLGLATLKRASFAKSVIGTPEFMAPEMYEEKYDESVDVYAFGMCMLEMATSEYPYSECQNAAQIYRRVTSGVKPASFDKVAIPEVKEIIEGCIRQNKDERYSIKDLLNHAFFQEETGVRVELAEEDDGEKIAIKLWLRIEDIKKLKGKYKDNEAIEFSFDLERDVPEDVAQEMVESGYVCEGDHKTMAKAIKDRVSLIKRKREQRQLVREEQEKKKQEESSLKQQVEQSSASQTGIKQLPSASTGIPTASTTSASVSTQVEPEEPEADQHQQLQYQQPSISVLSDGTVDSGQGSSVFTESRVSSQQTVSYGSQHEQAHSTGTVPGHIPSTVQAQSQPHGVYPPSSVAQGQSQGQPSSSSLTGVSSSQPIQHPQQQQGIQQTAPPQQTVQYSLSQTSTSSEATTAQPVSQPQAPQVLPQVSAGKQSTQGVSQVAPAEPVAVAQPQATQPTTLASSVDSAHSDVASGMSDGNENVPSSSGRHEGRTTKRHYRKSVRSRSRHEKTSRPKLRILNVSNKGDRVVECQLETHNRKMVTFKFDLDGDNPEEIATIMVNNDFILAIERESFVDQVREIIEKADEMLSEDVSVEPEGDQGLESLQGKDDYGFSGSQKLEGEFKQPIPASSMPQQIGIPTSSLTQVVHSAGRRFIVSPVPESRLRESKVFPSEITDTVAASTAQSPGMNLSHSASSLSLQQAFSELRRAQMTEGPNTAPPNFSHTGPTFPVVPPFLSSIAGVPTTAAATAPVPATSSPPNDISTSVIQSEVTVPTEEGIAGVATSTGVVTSGGLPIPPVSESPVLSSVVSSITIPAVVSISTTSPSLQVPTSTSEIVVSSTALYPSVTVSATSASAGGSTATPGPKPPAVVSQQAAGSTTVGATLTSVSTTTSFPSTASQLSIQLSSSTSTPTLAETVVVSAHSLDKTSHSSTTGLAFSLSAPSSSSSPGAGVSSYISQPGGLHPLVIPSVIASTPILPQAAGPTSTPLLPQVPSIPPLVQPVANVPAVQQTLIHSQPQPALLPNQPHTHCPEVDSDTQPKAPGIDDIKTLEEKLRSLFSEHSSSGAQHASVSLETSLVIESTVTPGIPTTAVAPSKLLTSTTSTCLPPTNLPLGTVALPVTPVVTPGQVSTPVSTTTSGVKPGTAPSKPPLTKAPVLPVGTELPAGTLPSEQLPPFPGPSLTQSQQPLEDLDAQLRRTLSPEXITVTSAVGPVSMAAPTAITEAGTQPQKGVSQVKEGPVLATSSGAGVFKMGRFQVSVAADGAQKEGKNKSEDAKSVHFESSTSESSVLSSSSPESTLVKPEPNGITIPGISSDVPESAHKTTASEAKSDTGQPTKVGRFQVTTTANKVGRFSVSKTEDKITDTKKEGPVASPPFMDLEQAVLPAVIPKKEKPELSEPSHLNGPSSDPEAAFLSRDVDDGSGSPHSPHQLSSKSLPSQNLSQSLSNSFNSSYMSSDNESDIEDEDLKLELRRLRDKHLKEIQDLQSRQKHEIESLYTKLGKVPPAVIIPPAAPLSGRRRRPTKSKGSKSSRSSSLGNKSPQLSGNLSGQSAASVLHPQQTLHPPGNIPESGQNQLLQPLKPSPSSDNLYSAFTSDGAISVPSLSAPGQGIKQPSSSKNNKMEMLPYLGQKPVKAGWETS

SEQ ID NO: 139 - DNA, 6885 bp, Homo Sapiens
  CDS (1)...(6885)
atggacaaggacagccgtggggcggccgcgaccactaccaccactgagcaccgcttcttccgccggagcgtcatctgcgactccaatgccactgcactggagcttcccggccttcctctttccctgccccagcccagcatccccgcggctgtcccgcagagtgctccaccggagccccaccgggaagagaccgtgaccgccaccgccacttcccaggtagcccagcagcctccagccgctgccgcccctggggaacaggccgtcgcgggccctgccccctcgactgtccccagcagtaccagcaaagaccgcccagtgtcccagcctagccttgtggggagcaaagaggagccgccgccggcgagaagtggcagcggcggcggcagcgccaaggagccacaggaggaacggagccagcagcaggatgatatcgaagagctggagaccaaggccgtgggaatgtctaacgatggccgctttctcaagtttgacatcgaaatcggcagaggctcctttaagacggtctacaaaggtctggacactgaaaccaccgtggaagtcgcctggtgtgaactgcaggatcgaaaattaacaaagtctgagaggcagagatttaaagaagaagctgaaatgttaaaaggtcttcagcatcccaatattgttagattttatgattcctgggaatccacagtaaaaggaaagaagtgcattgttttggtgactgaacttatgacgtctggaacacttaaaacgtatctgaaaaggtttaaagtgatgaagatcaaagttctaagaagctggtgccgtcagatccttaaaggtcttcagtttcttcatactcgaactccacctatcattcaccgcgatcttaaatgtgacaacatctttatcaccggccctactggctcagtcaagattggagacctcggtctggcaaccctgaagcgggcttcttttgccaagagtgtgataggtaccccagagttcatggcccctgagatgtatgaggagaaatatgatgaatccgttgacgtttatgcttttgggatgtgcatgcttgagatggctacatctgaatatccttactcggagtgccaaaatgctgcacagatctaccgtcgcgtgaccagtggggtgaagccagccagttttgacaaagtagcaattcctgaagtgaaggaaattattgaaggatgcatacgacaaaacaaagatgaaagatattccatcaaagaccttttgaaccatgccttcttccaagaggaaacaggagtacgggtagaattagcagaagaagatgatggagaaaaaatagccataaaattatggctacgtattgaagatattaagaaattaaagggaaaatacaaagataatgaagctattgagttttcttttgatttagagagagatgtcccagaagatgttgcacaagaaatggtagagtctgggtatgtctgtgaaggtgatcacaagaccatggctaaagctatcaaagacagagtatcattaattaagaggaaacgagagcagcggcagttggtacgggaggagcaagaaaaaaaaaagcaggaagagagcagtctcaaacagcaggtagaacaatccagtgcttcccagacaggaatcaagcagctcccttctgctagcaccggcatacctactgcttctaccacttcagcttcagtttctacacaagtagaacctgaagaacctgaggcagatcaacatcaacaactacagtaccagcaacccagtatatctgtgttatctgatgggacggttgacagtggtcagggatcctctgtcttcacagaatctcgagtgagcagccaacagacagtttcatatggttcccaacatgaacaggcacattctacaggcacagtcccagggcatataccttctactgtccaagcacagtctcagccccatggggtatatccaccctcaagtgtgcagcagggaatacagcagacagcccctcctcaacagacagtgcagtattcactttcacagacatcaacctccagtgaggccactactgcacagccagtgagtcagcctcaagctccacaagtcttgcctcaagtatcagctggaaaacagcttccagtttcccagccagtaccaactatccaaggcgaacctcagatcccagttgcgacacaaccctcggttgttccagtccactctggtgctcatttccttccagtgggacagccgctccctactcccttgctccctcagtaccctgtctctcagattcccatatcaactcctcatgtgtctacggctcagacaggtttctcatcccttcccatcacaatggcagctggcattactcagcctctgctcacgttggcttcatctgctacaacagctgcgatcccgggggtatcaactgtggttcctagtcagcttccaacccttctgcagcctgtgactcagctgccaagtcaggttcacccacagctcctacaaccagcagttcagtccatgggaataccagctaaccttggacaagctgctgaggttccactttcctctggagatgttctgtaccagggcttcccacctcgactgccaccacagtacccaggagattcaaatattgctccctcttccaacgtggcttctgtttgcatccattctacagtcctawcccctcccatgccgacagaagtactggctacacctgggtactttcccacagtggtgcagccttatgtggaatcaaatcttttagttcctatgggtggtgtaggaggacaggttcaagtgtcccagccaggagggagtttagcacaagcccccactacatcctcccagcaagcagttttggagagtactcagggagtctctcaggttgctcctgcagagccagttgcagtagcacagccccaagctacccagccgaccactttggcttcctctgtagacagtgcacattcagatgttgcttcaggtatgagtgatggcaatgagaacgtcccatcttccagtggaaggcatgaaggaagaactacaaaacggcattaccgaaaatctgtaaggagtcgctctcgacatgaaaaaacttcacgcccaaaattaagaattttgaatgtttcaaataaaggagaccgagtagtagaatgtcaattagagactcataataggaaaatggttacattcaaatttgacctagatggtgacaaccccgaggagatagcaacaattatggtgaacaatgactttattctagcaatagagagagagtcgtttgtggatcaagtgcgagaaattattgaaaaagctgatgaaatgctcagtgaggatgtcagtgtggaaccagagggtgatcagggattggagagtctacaaggaaaggatgactatggcttttcaggttctcagaaattggaaggagagttcaaacaaccaattcctgcgtcttccatgccacagcaaataggcattcctaccagttctttaactcaagttgttcattctgcgggaaggcggtttatagtgagtcctgtgccagaaagccgattacgagaatcaaaagttttccccagtgaaataacagatacagttgctgcctctacagctcagagccctggaatgaacttgtctcactctgcatcatcccttagtctacaacaggccttttctgaacttagacgtgcccaaatgacagaaggacccaayacagcacctccaaactttagtcatacaggaccaacatttccagtagtacctcctttcttaagtagcattgctggagtcccaaccacagcagcagccacagcaccagtccctgcaacaagcagccctcctaatgacatttccacatcagtaattcagtctgaggttacagtgcccactgaagaggggattgctggagttgccaccagcacaggtgtggtaacttcaggtggtctccccataccacctgtgtctgaatcaccagtactttccagcgtagtttcaagtatcacaatacctgcagttgtctcaatatctactacatccccgtcacttcaagtccccacatccacatctgagatcgttgtttctagtacagcactgtatccttcagtaacagtttcagcaacttcagcctctgcagggggcagtactgctaccccaggtcctaagcctccagctgtagtatctcagcaggcagcaggcagcactactgtgggagccacattaacatcagtttctaccaccacttcattcccaagcacagcttcacagctgtccattcagcttagcagcagtacttctactcctactttagctgaaaccgtggtagttagcgcacactcactagataagacatctcatagcagtacaactggattggctttctccctctctgcaccatcttcctcttcctctcctggagcaggagtgtctagttatatttctcagcctggtgggctgcatcctttggtcattccatcagtgatagcttctactcctattcttccccaagcagcaggacctacttctacacctttattaccccaagtacctagtatcccacccttggtacagcctgttgccaatgtgcctgctgtacagcagacactaattcatagtcagcctcaaccagctttgcttcccaaccagccccatactcattgtcctgaagtagattctgatacacaacccaaagctcctggaattgatgacataaagactctagaagaaaagctgcggtctctgttcagtgaacacagctcatctggagctcagcatgcctctgtctcactggagacctcactagtcatagagagcactgtcacaccaggcatcccaactactgctgttgcaccaagcaaactcctgacttctaccacaagtacttgcttaccaccaaccaatttaccactaggaacagttgctttgccagttacaccagtggtcacacctgggcaagtttctaccccagtcagcactactacatcaggagtgaaacctggaactgctccctccaagccacctctaactaaggctccggtgctgccagtgggtactgaacttccagcaggtactctacccagcgagcagctgccaccttttccaggaccttctctaacccagtcccagcaacctctagaggatcttgatgctcaattgagaagaacacttagtccagagatkatcacagtgacttctgcggttggtcctgtgtccatggcggctccaacagcaatcacagaagcaggaacacagcctcagaagggtgtttctcaagtcaaagaaggccctgtcctagcaactagttcaggagctggtgtttttaagatgggacgatttcaggtttctgttgcagcagacggtgcccagaaagagggtaaaaataagtcagaagatgcaaagtctgttcattttgaatccagcacctcagagtcctcagtgctatcaagtagtagtccagagagtaccttggtgaaaccagagccgaatggcataaccatccctggtatctcttcagatgtgccagagagtgcccacaaaactactgcctcagaggcaaagtcagacactgggcagcctaccaaggttggacgttttcaggtgacaactacagcaaacaaagtgggtcgtttctctgtatcaaaaactgaggacaagatcactgacacaaagaaagaaggaccagtggcatctcctccttttatggatttggaacaagctgttcttcctgctgtgataccaaagaaagagaagcctgaactgtcagagccttcacatctaaatgggccgtcttctgacccggaggccgcttttttaagtagggatgtggatgatggttccggtagtccacactcgccccatcagctgagctcaaagagccttcctagccagaatctaagtcaaagccttagtaattcatttaactcctcttacatgagtagcgacaatgagtcagatatcgaagatgaagacttaaagttagagctgcgacgactacgagataaacatctcaaagagattcaggacctgcagagtcgccagaagcatgaaattgaatctttgtataccaaactgggcaaggtgccccctgctgttattattcccccagctgctcccctttcagggagaagacgacgacccactaaaagcaaaggcagcaaatctagtcgaagcagttccttggggaataaaagcccccagctttcaggtaacctgtctggtcagagtgcagcttcagtcttgcacccccagcagaccctccaccctcctggcaacatcccagagtccgggcagaatcagctgttacagccccttaagccatctccctccagtgacaacctctattcagccttcaccagtgatggtgccatttcagtaccaagcctttctgctccaggtcaaggaaccagcagcacaaacactgttggggcaacagtgaacagccaagccgcccaagctcagcctcctgccatgacgtccagcaggaagggcacattcacagatgacttgcacaagttggtagacaattgggcccgagatgccatgaatctctcaggcaggagaggaagcaaagggcacatgaattatgagggccctggaatggcaaggaagttctctgcacctgggcaactgtgcatctccatgacctcgaacctgggtggctctgcccccatctctgcagcatcagctacctctctaggtcacttcaccaagtctatgtgccccccacagcagtatggctttccagctaccccatttggcgctcaatggagtgggacgggtggcccagcaccacagccacttggccagttccaacctgtgggaactgcctccttgcagaatttcaacatcagcaatttgcagaaatccatcagcaaccccccaggctccaacctgcggaccacttag

SEQ ID NO: 140 - protein, 2294 aa, Homo Sapiens
  VARIANT 889, 1720: Xaa = Any Amino Acid
MDKDSRGAAATTTTTEHRFFRRSVICDSNATALELPGLPLSLPQPSIPAAVPQSAPPEPHREETVTATATSQVAQQPPAAAAPGEQAVAGPAPSTVPSSTSKDRPVSQPSLVGSKEEPPPARSGSGGGSAKEPQEERSQQQDDIEELETKAVGMSNDGRFLKFDIEIGRGSFKTVYKGLDTETTVEVAWCELQDRKLTKSERQRFKEEAEMLKGLQHPNIVRFYDSWESTVKGKKCIVLVTELMTSGTLKTYLKRFKVMKIKVLRSWCRQILKGLQFLHTRTPPIIHRDLKCDNIFITGPTGSVKIGDLGLATLKRASFAKSVIGTPEFMAPEMYEEKYDESVDVYAFGMCMLEMATSEYPYSECQNAAQIYRRVTSGVKPASFDKVAIPEVKEIIEGCIRQNKDERYSIKDLLNHAFFQEETGVRVELAEEDDGEKIAIKLWLRIEDIKKLKGKYKDNEAIEFSFDLERDVPEDVAQEMVESGYVCEGDHKTMAKAIKDRVSLIKRKREQRQLVREEQEKKKQEESSLKQQVEQSSASQTGIKQLPSASTGIPTASTTSASVSTQVEPEEPEADQHQQLQYQQPSISVLSDGTVDSGQGSSVFTESRVSSQQTVSYGSQHEQAHSTGTVPGHIPSTVQAQSQPHGVYPPSSVQQGIQQTAPPQQTVQYSLSQTSTSSEATTAQPVSQPQAPQVLPQVSAGKQLPVSQPVPTIQGEPQIPVATQPSVVPVHSGAHFLPVGQPLPTPLLPQYPVSQIPISTPHVSTAQTGFSSLPITMAAGITQPLLTLASSATTAAIPGVSTVVPSQLPTLLQPVTQLPSQVHPQLLQPAVQSMGIPANLGQAAEVPLSSGDVLYQGFPPRLPPQYPGDSNIAPSSNVASVCIHSTVLXPPMPTEVLATPGYFPTVVQPYVESNLLVPMGGVGGQVQVSQPGGSLAQAPTTSSQQAVLESTQGVSQVAPAEPVAVAQPQATQPTTLASSVDSAHSDVASGMSDGNENVPSSSGRHEGRTTKRHYRKSVRSRSRHEKTSRPKLRILNVSNKGDRVVECQLETHNRKMVTFKFDLDGDNPEEIATIMVNNDFILAIERESFVDQVREIIEKADEMLSEDVSVEPEGDQGLESLQGKDDYGFSGSQKLEGEFKQPIPASSMPQQIGIPTSSLTQVVHSAGRRFIVSPVPESRLRESKVFPSEITDTVAASTAQSPGMNLSHSASSLSLQQAFSELRRAQMTEGPNTAPPNFSHTGPTFPVVPPFLSSIAGVPTTAAATAPVPATSSPPNDISTSVIQSEVTVPTEEGIAGVATSTGVVTSGGLPIPPVSESPVLSSVVSSITIPAVVSISTTSPSLQVPTSTSEIVVSSTALYPSVTVSATSASAGGSTATPGPKPPAVVSQQAAGSTTVGATLTSVSTTTSFPSTASQLSIQLSSSTSTPTLAETVVVSAHSLDKTSHSSTTGLAFSLSAPSSSSSPGAGVSSYISQPGGLHPLVIPSVIASTPILPQAAGPTSTPLLPQVPSIPPLVQPVANVPAVQQTLIHSQPQPALLPNQPHTHCPEVDSDTQPKAPGIDDIKTLEEKLRSLFSEHSSSGAQHASVSLETSLVIESTVTPGIPTTAVAPSKLLTSTTSTCLPPTNLPLGTVALPVTPVVTPGQVSTPVSTTTSGVKPGTAPSKPPLTKAPVLPVGTELPAGTLPSEQLPPFPGPSLTQSQQPLEDLDAQLRRTLSPEXITVTSAVGPVSMAAPTAITEAGTQPQKGVSQVKEGPVLATSSGAGVFKMGRFQVSVAADGAQKEGKNKSEDAKSVHFESSTSESSVLSSSSPESTLVKPEPNGITIPGISSDVPESAHKTTASEAKSDTGQPTKVGRFQVTTTANKVGRFSVSKTEDKITDTKKEGPVASPPFMDLEQAVLPAVIPKKEKPELSEPSHLNGPSSDPEAAFLSRDVDDGSGSPHSPHQLSSKSLPSQNLSQSLSNSFNSSYMSSDNESDIEDEDLKLELRRLRDKHLKEIQDLQSRQKHEIESLYTKLGKVPPAVIIPPAAPLSGRRRRPTKSKGSKSSRSSSLGNKSPQLSGNLSGQSAASVLHPQQTLHPPGNIPESGQNQLLQPLKPSPSSDNLYSAFTSDGAISVPSLSAPGQGTSSTNTVGATVNSQAAQAQPPAMTSSRKGTFTDDLHKLVDNWARDAMNLSGRRGSKGHMNYEGPGMARKFSAPGQLCISMTSNLGGSAPISAASATSLGHFTKSMCPPQQYGFPATPFGAQWSGTGGPAPQPLGQFQPVGTASLQNFNISNLQKSISNPPGSNLRTT

SEQ ID NO: 141 - DNA, 6474 bp, Homo Sapiens
  CDS (1)...(6474)
atggacaaggacagccgtggggcggccgcgaccactaccaccactgagcaccgcttcttccgccggagcgtcatctgcgactccaatgccactgcactggagcttcccggccttcctctttccctgccccagcccagcatccccgcggctgtcccgcagagtgctccaccggagccccaccgggaagagaccgtgaccgccaccgccacttcccaggtagcccagcagcctccagccgctgccgcccctggggaacaggccgtcgcgggccctgccccctcgactgtccccagcagtaccagcaaagaccgcccagtgtcccagcctagccttgtggggagcaaagaggagccgccgccggcgagaagtggcagcggcggcggcagcgccaaggagccacaggaggaacggagccagcagcaggatgatatcgaagagctggagaccaaggccgtgggaatgtctaacgatggccgctttctcaagtttgacatcgaaatcggcagaggctcctttaagacggtctacaaaggtctggacactgaaaccaccgtggaagtcgcctggtgtgaactgcaggatcgaaaattaacaaagtctgagaggcagagatttaaagaagaagctgaaatgttaaaaggtcttcagcatcccaatattgttagattttatgattcctgggaatccacagtaaaaggaaagaagtgcattgttttggtgactgaacttatgacgtctggaacacttaaaacgtatctgaaaaggtttaaagtgatgaagatcaaagttctaagaagctggtgccgtcagatccttaaaggtcttcagtttcttcatactcgaactccacctatcattcaccgcgatcttaaatgtgacaacatctttatcaccggccctactggctcagtcaagattggagacctcggtctggcaaccctgaagcgggcttcttttgccaagagtgtgataggtaccccagagttcatggcccctgagatgtatgaggagaaatatgatgaatccgttgacgtttatgcttttgggatgtgcatgcttgagatggctacatctgaatatccttactcggagtgccaaaatgctgcacagatctaccgtcgcgtgaccagtggggtgaagccagccagttttgacaaagtagcaattcctgaagtgaaggaaattattgaaggatgcatacgacaaaacaaagatgaaagatattccatcaaagaccttttgaaccatgccttcttccaagaggaaacaggagtacgggtagaattagcagaagaagatgatggagaaaaaatagccataaaattatggctacgtattgaagatattaagaaattaaagggaaaatacaaagataatgaagctattgagttttcttttgatttagagagagatgtcccagaagatgttgcacaagaaatggtagagtctgggtatgtctgtgaaggtgatcacaagaccatggctaaagctatcaaagacagagtatcattaattaagaggaaacgagagcagcggcagttggtacgggaggagcaagaaaaaaaaaagcaggaagagagcagtctcaaacagcaggtagaacaatccagtgcttcccagacaggaatcaagcagctcccttctgctagcaccggcatacctactgcttctaccacttcagcttcagtttctacacaagtagaacctgaagaacctgaggcagatcaacatcaacaactacagtaccagcaacccagtatatctgtgttatctgatgggacggttgacagtggtcagggatcctctgtcttcacagaatctcgagtgagcagccaacagacagtttcatatggttcccaacatgaacaggcacattctacaggcacagtcccagggcatataccttctactgtccaagcacagtctcagccccatggggtatatccaccctcaagtgtgcagcagggaatacagcagacagcccctcctcaacagacagtgcagtattcactttcacagacatcaacctccagtgaggccactactgcacagccagtgagtcagcctcaagctccacaagtcttgcctcaagtatcagctggaaaacagcttccagtttcccagccagtaccaactatccaaggcgaacctcagatcccagttgcgacacaaccctcggttgttccagtccactctggtgctcatttccttccagtgggacagccgctccctactcccttgctccctcagtaccctgtctctcagattcccatatcaactcctcatgtgtctacggctcagacaggtttctcatcccttcccatcacaatggcagctggcattactcagcctctgctcacgttggcttcatctgctacaacagctgcgatcccgggggtatcaactgtggttcctagtcagcttccaacccttctgcagcctgtgactcagctgccaagtcaggttcacccacagctcctacaaccagcagttcagtccatgggaataccagctaaccttggacaagctgctgaggttccactttcctctggagatgttctgtaccagggcttcccacctcgactgccaccacagtacccaggagattcaaatattgctccctcttccaacgtggcttctgtttgcatccattctacagtcctawcccctcccatgccgacagaagtactggctacacctgggtactttcccacagtggtgcagccttatgtggaatcaaatcttttagttcctatgggtggtgtaggaggacaggttcaagtgtcccagccaggagggagtttagcacaagcccccactacatcctcccagcaagcagttttggagagtactcagggagtctctcaggttgctcctgcagagccagttgcagtagcacagccccaagctacccagccgaccactttggcttcctctgtagacagtgcacattcagatgttgcttcaggtatgagtgatggcaatgagaacgtcccatcttccagtggaaggcatgaaggaagaactacaaaacggcattaccgaaaatctgtaaggagtcgctctcgacatgaaaaaacttcacgcccaaaattaagaattttgaatgtttcaaataaaggagaccgagtagtagaatgtcaattagagactcataataggaaaatggttacattcaaatttgacctagatggtgacaaccccgaggagatagcaacaattatggtgaacaatgactttattctagcaatagagagagagtcgtttgtggatcaagtgcgagaaattattgaaaaagctgatgaaatgctcagtgaggatgtcagtgtggaaccagagggtgatcagggattggagagtctacaaggaaaggatgactatggcttttcaggttctcagaaattggaaggagagttcaaacaaccaattcctgcgtcttccatgccacagcaaataggcattcctaccagttctttaactcaagttgttcattctgcgggaaggcggtttatagtgagtcctgtgccagaaagccgattacgagaatcaaaagttttccccagtgaaataacagatacagttgctgcctctacagctcagagccctggaatgaacttgtctcactctgcatcatcccttagtctacaacaggccttttctgaacttagacgtgcccaaatgacagaaggacccaayacagcacctccaaactttagtcatacaggaccaacatttccagtagtacctcctttcttaagtagcattgctggagtcccaaccacagcagcagccacagcaccagtccctgcaacaagcagccctcctaatgacatttccacatcagtaattcagtctgaggttacagtgcccactgaagaggggattgctggagttgccaccagcacaggtgtggtaacttcaggtggtctccccataccacctgtgtctgaatcaccagtactttccagcgtagtttcaagtatcacaatacctgcagttgtctcaatatctactacatccccgtcacttcaagtccccacatccacatctgagatcgttgtttctagtacagcactgtatccttcagtaacagtttcagcaacttcagcctctgcagggggcagtactgctaccccaggtcctaagcctccagctgtagtatctcagcaggcagcaggcagcactactgtgggagccacattaacatcagtttctaccaccacttcattcccaagcacagcttcacagctgtccattcagcttagcagcagtacttctactcctactttagctgaaaccgtggtagttagcgcacactcactagataagacatctcatagcagtacaactggattggctttctccctctctgcaccatcttcctcttcctctcctggagcaggagtgtctagttatatttctcagcctggtgggctgcatcctttggtcattccatcagtgatagcttctactcctattcttccccaagcagcaggacctacttctacacctttattaccccaagtacctagtatcccacccttggtacagcctgttgccaatgtgcctgctgtacagcagacactaattcatagtcagcctcaaccagctttgcttcccaaccagccccatactcattgtcctgaagtagattctgatacacaacccaaagctcctggaattgatgacataaagactctagaagaaaagctgcggtctctgttcagtgaacacagctcatctggagctcagcatgcctctgtctcactggagacctcactagtcatagagagcactgtcacaccaggcatcccaactactgctgttgcaccaagcaaactcctgacttctaccacaagtacttgcttaccaccaaccaatttaccactaggaacagttgctttgccagttacaccagtggtcacacctgggcaagtttctaccccagtcagcactactacatcaggagtgaaacctggaactgctccctccaagccacctctaactaaggctccggtgctgccagtgggtactgaacttccagcaggtactctacccagcgagcagctgccaccttttccaggaccttctctaacccagtcccagcaacctctagaggatcttgatgctcaattgagaagaacacttagtccagagatkatcacagtgacttctgcggttggtcctgtgtccatggcggctccaacagcaatcacagaagcaggaacacagcctcagaagggtgtttctcaagtcaaagaaggccctgtcctagcaactagttcaggagctggtgtttttaagatgggacgatttcaggtttctgttgcagcagacggtgcccagaaagagggtaaaaataagtcagaagatgcaaagtctgttcattttgaatccagcacctcagagtcctcagtgctatcaagtagtagtccagagagtaccttggtgaaaccagagccgaatggcataaccatccctggtatctcttcagatgtgccagagagtgcccacaaaactactgcctcagaggcaaagtcagacactgggcagcctaccaaggttggacgttttcaggtgacaactacagcaaacaaagtgggtcgtttctctgtatcaaaaactgaggacaagatcactgacacaaagaaagaaggaccagtggcatctcctccttttatggatttggaacaagctgttcttcctgctgtgataccaaagaaagagaagcctgaactgtcagagccttcacatctaaatgggccgtcttctgacccggaggccgcttttttaagtagggatgtggatgatggttccggtagtccacactcgccccatcagctgagctcaaagagccttcctagccagaatctaagtcaaagccttagtaattcatttaactcctcttacatgagtagcgacaatgagtcagatatcgaagatgaagacttaaagttagagctgcgacgactacgagataaacatctcaaagagattcaggacctgcagagtcgccagaagcatgaaattgaatctttgtataccaaactgggcaaggtgccccctgctgttattattcccccagctgctcccctttcagggagaagacgacgacccactaaaagcaaaggcagcaaatctagtcgaagcagttccttggggaataaaagcccccagctttcaggtaacctgtctggtcagagtgcagcttcagtcttgcacccccagcagaccctccaccctcctggcaacatcccagagtccgggcagaatcagctgttacagccccttaagccatctccctccagtgacaacctctattcagccttcaccagtgatggtgccatttcagtaccaagcctttctgctccaggtcaaggaataaagcaaccatcatcgtccaaaaacaataaaatggagatgttgccatacctgggacaaaagcctgttaaggcgggttgggagactagctga

SEQ ID NO: 142 - protein, 2157 aa, Homo Sapiens
  VARIANT 889, 1720: Xaa = Any Amino Acid
MDKDSRGAAATTTTTEHRFFRRSVICDSNATALELPGLPLSLPQPSIPAAVPQSAPPEPHREETVTATATSQVAQQPPAAAAPGEQAVAGPAPSTVPSSTSKDRPVSQPSLVGSKEEPPPARSGSGGGSAKEPQEERSQQQDDIEELETKAVGMSNDGRFLKFDIEIGRGSFKTVYKGLDTETTVEVAWCELQDRKLTKSERQRFKEEAEMLKGLQHPNIVRFYDSWESTVKGKKCIVLVTELMTSGTLKTYLKRFKVMKIKVLRSWCRQILKGLQFLHTRTPPIIHRDLKCDNIFITGPTGSVKIGDLGLATLKRASFAKSVIGTPEFMAPEMYEEKYDESVDVYAFGMCMLEMATSEYPYSECQNAAQIYRRVTSGVKPASFDKVAIPEVKEIIEGCIRQNKDERYSIKDLLNHAFFQEETGVRVELAEEDDGEKIAIKLWLRIEDIKKLKGKYKDNEAIEFSFDLERDVPEDVAQEMVESGYVCEGDHKTMAKAIKDRVSLIKRKREQRQLVREEQEKKKQEESSLKQQVEQSSASQTGIKQLPSASTGIPTASTTSASVSTQVEPEEPEADQHQQLQYQQPSISVLSDGTVDSGQGSSVFTESRVSSQQTVSYGSQHEQAHSTGTVPGHIPSTVQAQSQPHGVYPPSSVQQGIQQTAPPQQTVQYSLSQTSTSSEATTAQPVSQPQAPQVLPQVSAGKQLPVSQPVPTIQGEPQIPVATQPSVVPVHSGAHFLPVGQPLPTPLLPQYPVSQIPISTPHVSTAQTGFSSLPITMAAGITQPLLTLASSATTAAIPGVSTVVPSQLPTLLQPVTQLPSQVHPQLLQPAVQSMGIPANLGQAAEVPLSSGDVLYQGFPPRLPPQYPGDSNIAPSSNVASVCIHSTVLXPPMPTEVLATPGYFPTVVQPYVESNLLVPMGGVGGQVQVSQPGGSLAQAPTTSSQQAVLESTQGVSQVAPAEPVAVAQPQATQPTTLASSVDSAHSDVASGMSDGNENVPSSSGRHEGRTTKRHYRKSVRSRSRHEKTSRPKLRILNVSNKGDRVVECQLETHNRKMVTFKFDLDGDNPEEIATIMVNNDFILAIERESFVDQVREIIEKADEMLSEDVSVEPEGDQGLESLQGKDDYGFSGSQKLEGEFKQPIPASSMPQQIGIPTSSLTQVVHSAGRRFIVSPVPESRLRESKVFPSEITDTVAASTAQSPGMNLSHSASSLSLQQAFSELRRAQMTEGPNTAPPNFSHTGPTFPVVPPFLSSIAGVPTTAAATAPVPATSSPPNDISTSVIQSEVTVPTEEGIAGVATSTGVVTSGGLPIPPVSESPVLSSVVSSITIPAVVSISTTSPSLQVPTSTSEIVVSSTALYPSVTVSATSASAGGSTATPGPKPPAVVSQQAAGSTTVGATLTSVSTTTSFPSTASQLSIQLSSSTSTPTLAETVVVSAHSLDKTSHSSTTGLAFSLSAPSSSSSPGAGVSSYISQPGGLHPLVIPSVIASTPILPQAAGPTSTPLLPQVPSIPPLVQPVANVPAVQQTLIHSQPQPALLPNQPHTHCPEVDSDTQPKAPGIDDIKTLEEKLRSLFSEHSSSGAQHASVSLETSLVIESTVTPGIPTTAVAPSKLLTSTTSTCLPPTNLPLGTVALPVTPVVTPGQVSTPVSTTTSGVKPGTAPSKPPLTKAPVLPVGTELPAGTLPSEQLPPFPGPSLTQSQQPLEDLDAQLRRTLSPEXITVTSAVGPVSMAAPTAITEAGTQPQKGVSQVKEGPVLATSSGAGVFKMGRFQVSVAADGAQKEGKNKSEDAKSVHFESSTSESSVLSSSSPESTLVKPEPNGITIPGISSDVPESAHKTTASEAKSDTGQPTKVGRFQVTTTANKVGRFSVSKTEDKITDTKKEGPVASPPFMDLEQAVLPAVIPKKEKPELSEPSHLNGPSSDPEAAFLSRDVDDGSGSPHSPHQLSSKSLPSQNLSQSLSNSFNSSYMSSDNESDIEDEDLKLELRRLRDKHLKEIQDLQSRQKHEIESLYTKLGKVPPAVIIPPAAPLSGRRRRPTKSKGSKSSRSSSLGNKSPQLSGNLSGQSAASVLHPQQTLHPPGNIPESGQNQLLQPLKPSPSSDNLYSAFTSDGAISVPSLSAPGQGIKQPSSSKNNKMEMLPYLGQKPVKAGWETS

SEQ ID NO: 143 - DNA, 2685 bp, Homo Sapiens
  CDS (1)...(2685)
atggacaaggacagccgtggggcggccgcgaccactaccaccactgagcaccgcttcttccgccggagcgtcatctgcgactccaatgccactgcactggagcttcccggccttcctctttccctgccccagcccagcatccccgcggctgtcccgcagagtgctccaccggagccccaccgggaagagaccgtgaccgccaccgccacttcccaggtagcccagcagcctccagccgctgccgcccctggggaacaggccgtcgcgggccctgccccctcgactgtccccagcagtaccagcaaagaccgcccagtgtcccagcctagccttgtggggagcaaagaggagccgccgccggcgagaagtggcagcggcggcggcagcgccaaggagccacaggaggaacggagccagcagcaggatgatatcgaagagctggagaccaaggccgtgggaatgtctaacgatggccgctttctcaagtttgacatcgaaatcggcagaggctcctttaagacggtctacaaaggtctggacactgaaaccaccgtggaagtcgcctggtgtgaactgcaggatcgaaaattaacaaagtctgagaggcagagatttaaagaagaagctgaaatgttaaaaggtcttcagcatcccaatattgttagattttatgattcctgggaatccacagtaaaaggaaagaagtgcattgttttggtgactgaacttatgacgtctggaacacttaaaacgtatctgaaaaggtttaaagtgatgaagatcaaagttctaagaagctggtgccgtcagatccttaaaggtcttcagtttcttcatactcgaactccacctatcattcaccgcgatcttaaatgtgacaacatctttatcaccggccctactggctcagtcaagattggagacctcggtctggcaaccctgaagcgggcttcttttgccaagagtgtgataggtaccccagagttcatggcccctgagatgtatgaggagaaatatgatgaatccgttgacgtttatgcttttgggatgtgcatgcttgagatggctacatctgaatatccttactcggagtgccaaaatgctgcacagatctaccgtcgcgtgaccagtggggtgaagccagccagttttgacaaagtagcaattcctgaagtgaaggaaattattgaaggatgcatacgacaaaacaaagatgaaagatattccatcaaagaccttttgaaccatgccttcttccaagaggaaacaggagtacgggtagaattagcagaagaagatgatggagaaaaaatagccataaaattatggctacgtattgaagatattaagaaattaaagggaaaatacaaagataatgaagctattgagttttcttttgatttagagagagatgtcccagaagatgttgcacaagaaatggtagagtctgggtatgtctgtgaaggtgatcacaagaccatggctaaagctatcaaagacagagtatcattaattaagaggaaacgagagcagcggcagttggtacgggaggagcaagaaaaaaaaaagcaggaagagagcagtctcaaacagcaggtagaacaatccagtgcttcccagacaggaatcaagcagctcccttctgctagcaccggcatacctactgcttctaccacttcagcttcagtttctacacaagtagaacctgaagaacctgaggcagatcaacatcaacaactacagtaccagcaacccagtatatctgtgttatctgatgggacggttgacagtggtcagggatcctctgtcttcacagaatctcgagtgagcagccaacagacagtttcatatggttcccaacatgaacaggcacattctacaggcacagtcccagggcatataccttctactgtccaagcacagtctcagccccatggggtatatccaccctcaagtgtgcagcagggaatacagcagacagcccctcctcaacagacagtgcagtattcactttcacagacatcaacctccagtgaggccactactgcacagccagtgagtcagcctcaagctccacaagtcttgcctcaagtatcagctggaaaacagcttccagtttcccagccagtaccaactatccaaggcgaacctcagatcccagttgcgacacaaccctcggttgttccagtccactctggtgctcatttccttccagtgggacagccgctccctactcccttgctccctcagtaccctgtctctcagattcccatatcaactcctcatgtgtctacggctcagacaggtttctcatcccttcccatcacaatggcagctggcattactcagcctctgctcacgttggcttcatctgctacaacagctgcgatcccgggggtatcaactgtggttcctagtcagcttccaacccttctgcagcctgtgactcagctgccaagtcaggttcacccacagctcctacaaccagcagttcagtccatgggaataccagctaaccttggacaagctgctgaggttccactttcctctggagatgttctgtaccagggcttcccacctcgactgccaccacagtacccaggagattcaaatattgctccctcttccaacgtggcttctgtttgcatccattctacagtcctawcccctataccttctgcataa

SEQ ID NO: 144 - protein, 894 aa, Homo Sapiens
  VARIANT 889: Xaa = Any Amino Acid
MDKDSRGAAATTTTTEHRFFRRSVICDSNATALELPGLPLSLPQPSIPAAVPQSAPPEPHREETVTATATSQVAQQPPAAAAPGEQAVAGPAPSTVPSSTSKDRPVSQPSLVGSKEEPPPARSGSGGGSAKEPQEERSQQQDDIEELETKAVGMSNDGRFLKFDIEIGRGSFKTVYKGLDTETTVEVAWCELQDRKLTKSERQRFKEEAEMLKGLQHPNIVRFYDSWESTVKGKKCIVLVTELMTSGTLKTYLKRFKVMKIKVLRSWCRQILKGLQFLHTRTPPIIHRDLKCDNIFITGPTGSVKIGDLGLATLKRASFAKSVIGTPEFMAPEMYEEKYDESVDVYAFGMCMLEMATSEYPYSECQNAAQIYRRVTSGVKPASFDKVAIPEVKEIIEGCIRQNKDERYSIKDLLNHAFFQEETGVRVELAEEDDGEKIAIKLWLRIEDIKKLKGKYKDNEAIEFSFDLERDVPEDVAQEMVESGYVCEGDHKTMAKAIKDRVSLIKRKREQRQLVREEQEKKKQEESSLKQQVEQSSASQTGIKQLPSASTGIPTASTTSASVSTQVEPEEPEADQHQQLQYQQPSISVLSDGTVDSGQGSSVFTESRVSSQQTVSYGSQHEQAHSTGTVPGHIPSTVQAQSQPHGVYPPSSVQQGIQQTAPPQQTVQYSLSQTSTSSEATTAQPVSQPQAPQVLPQVSAGKQLPVSQPVPTIQGEPQIPVATQPSVVPVHSGAHFLPVGQPLPTPLLPQYPVSQIPISTPHVSTAQTGFSSLPITMAAGITQPLLTLASSATTAAIPGVSTVVPSQLPTLLQPVTQLPSQVHPQLLQPAVQSMGIPANLGQAAEVPLSSGDVLYQGFPPRLPPQYPGDSNIAPSSNVASVCIHSTVLXPIPSA

SEQ ID NO: 145 - DNA, 6426 bp, Homo Sapiens
  CDS (1)...(6426)
atggacaaggacagccgtggggcggccgcgaccactaccaccactgagcaccgcttcttccgccggagcgtcatctgcgactccaatgccactgcactggagcttcccggccttcctctttccctgccccagcccagcatccccgcggctgtcccgcagagtgctccaccggagccccaccgggaagagaccgtgaccgccaccgccacttcccaggtagcccagcagcctccagccgctgccgcccctggggaacaggccgtcgcgggccctgccccctcgactgtccccagcagtaccagcaaagaccgcccagtgtcccagcctagccttgtggggagcaaagaggagccgccgccggcgagaagtggcagcggcggcggcagcgccaaggagccacaggaggaacggagccagcagcaggatgatatcgaagagctggagaccaaggccgtgggaatgtctaacgatggccgctttctcaagtttgacatcgaaatcggcagaggctcctttaagacggtctacaaaggtctggacactgaaaccaccgtggaagtcgcctggtgtgaactgcaggatcgaaaattaacaaagtctgagaggcagagatttaaagaagaagctgaaatgttaaaaggtcttcagcatcccaatattgttagattttatgattcctgggaatccacagtaaaaggaaagaagtgcattgttttggtgactgaacttatgacgtctggaacacttaaaacgtatctgaaaaggtttaaagtgatgaagatcaaagttctaagaagctggtgccgtcagatccttaaaggtcttcagtttcttcatactcgaactccacctatcattcaccgcgatcttaaatgtgacaacatctttatcaccggccctactggctcagtcaagattggagacctcggtctggcaaccctgaagcgggcttcttttgccaagagtgtgataggtaccccagagttcatggcccctgagatgtatgaggagaaatatgatgaatccgttgacgtttatgcttttgggatgtgcatgcttgagatggctacatctgaatatccttactcggagtgccaaaatgctgcacagatctaccgtcgcgtgaccagtggggtgaagccagccagttttgacaaagtagcaattcctgaagtgaaggaaattattgaaggatgcatacgacaaaacaaagatgaaagatattccatcaaagaccttttgaaccatgccttcttccaagaggaaacaggagtacgggtagaattagcagaagaagatgatggagaaaaaatagccataaaattatggctacgtattgaagatattaagaaattaaagggaaaatacaaagataatgaagctattgagttttcttttgatttagagagagatgtcccagaagatgttgcacaagaaatggtagagtctgggtatgtctgtgaaggtgatcacaagaccatggctaaagctatcaaagacagagtatcattaattaagaggaaacgagagcagcggcagttggtacgggaggagcaagaaaaaaaaaagcaggaagagagcagtctcaaacagcaggtagaacaatccagtgcttcccagacaggaatcaagcagctcccttctgctagcaccggcatacctactgcttctaccacttcagcttcagtttctacacaagtagaacctgaagaacctgaggcagatcaacatcaacaactacagtaccagcaacccagtatatctgtgttatctgatgggacggttgacagtggtcagggatcctctgtcttcacagaatctcgagtgagcagccaacagacagtttcatatggttcccaacatgaacaggcacattctacaggcacagtcccagggcatataccttctactgtccaagcacagtctcagccccatggggtatatccaccctcaagtgtgcagcagggaatacagcagacagcccctcctcaacagacagtgcagtattcactttcacagacatcaacctccagtgaggccactactgcacagccagtgagtcagcctcaagctccacaagtcttgcctcaagtatcagctggaaaacagggcttcccacctcgactgccaccacagtacccaggagattcaaatattgctccctcttccaacgtggcttctgtttgcatccattctacagtcctawcccctcccatgccgacagaagtactggctacacctgggtactttcccacagtggtgcagccttatgtggaatcaaatcttttagttcctatgggtggtgtaggaggacaggttcaagtgtcccagccaggagggagtttagcacaagcccccactacatcctcccagcaagcagttttggagagtactcagggagtctctcaggttgctcctgcagagccagttgcagtagcacagccccaagctacccagccgaccactttggcttcctctgtagacagtgcacattcagatgttgcttcaggtatgagtgatggcaatgagaacgtcccatcttccagtggaaggcatgaaggaagaactacaaaacggcattaccgaaaatctgtaaggagtcgctctcgacatgaaaaaacttcacgcccaaaattaagaattttgaatgtttcaaataaaggagaccgagtagtagaatgtcaattagagactcataataggaaaatggttacattcaaatttgacctagatggtgacaaccccgaggagatagcaacaattatggtgaacaatgactttattctagcaatagagagagagtcgtttgtggatcaagtgcgagaaattattgaaaaagctgatgaaatgctcagtgaggatgtcagtgtggaaccagagggtgatcagggattggagagtctacaaggaaaggatgactatggcttttcaggttctcagaaattggaaggagagttcaaacaaccaattcctgcgtcttccatgccacagcaaataggcattcctaccagttctttaactcaagttgttcattctgcgggaaggcggtttatagtgagtcctgtgccagaaagccgattacgagaatcaaaagttttccccagtgaaataacagatacagttgctgcctctacagctcagagccctggaatgaacttgtctcactctgcatcatcccttagtctacaacaggccttttctgaacttagacgtgcccaaatgacagaaggacccaayacagcacctccaaactttagtcatacaggaccaacatttccagtagtacctcctttcttaagtagcattgctggagtcccaaccacagcagcagccacagcaccagtccctgcaacaagcagccctcctaatgacatttccacatcagtaattcagtctgaggttacagtgcccactgaagaggggattgctggagttgccaccagcacaggtgtggtaacttcaggtggtctccccataccacctgtgtctgaatcaccagtactttccagcgtagtttcaagtatcacaatacctgcagttgtctcaatatctactacatccccgtcacttcaagtccccacatccacatctgagatcgttgtttctagtacagcactgtatccttcagtaacagtttcagcaacttcagcctctgcagggggcagtactgctaccccaggtcctaagcctccagctgtagtatctcagcaggcagcaggcagcactactgtgggagccacattaacatcagtttctaccaccacttcattcccaagcacagcttcacagctgtccattcagcttagcagcagtacttctactcctactttagctgaaaccgtggtagttagcgcacactcactagataagacatctcatagcagtacaactggattggctttctccctctctgcaccatcttcctcttcctctcctggagcaggagtgtctagttatatttctcagcctggtgggctgcatcctttggtcattccatcagtgatagcttctactcctattcttccccaagcagcaggacctacttctacacctttattaccccaagtacctagtatcccacccttggtacagcctgttgccaatgtgcctgctgtacagcagacactaattcatagtcagcctcaaccagctttgcttcccaaccagccccatactcattgtcctgaagtagattctgatacacaacccaaagctcctggaattgatgacataaagactctagaagaaaagctgcggtctctgttcagtgaacacagctcatctggagctcagcatgcctctgtctcactggagacctcactagtcatagagagcactgtcacaccaggcatcccaactactgctgttgcaccaagcaaactcctgacttctaccacaagtacttgcttaccaccaaccaatttaccactaggaacagttgctttgccagttacaccagtggtcacacctgggcaagtttctaccccagtcagcactactacatcaggagtgaaacctggaactgctccctccaagccacctctaactaaggctccggtgctgccagtgggtactgaacttccagcaggtactctacccagcgagcagctgccaccttttccaggaccttctctaacccagtcccagcaacctctagaggatcttgatgctcaattgagaagaacacttagtccagagatkatcacagtgacttctgcggttggtcctgtgtccatggcggctccaacagcaatcacagaagcaggaacacagcctcagaagggtgtttctcaagtcaaagaaggccctgtcctagcaactagttcaggagctggtgtttttaagatgggacgatttcaggtttctgttgcagcagacggtgcccagaaagagggtaaaaataagtcagaagatgcaaagtctgttcattttgaatccagcacctcagagtcctcagtgctatcaagtagtagtccagagagtaccttggtgaaaccagagccgaatggcataaccatccctggtatctcttcagatgtgccagagagtgcccacaaaactactgcctcagaggcaaagtcagacactgggcagcctaccaaggttggacgttttcaggtgacaactacagcaaacaaagtgggtcgtttctctgtatcaaaaactgaggacaagatcactgacacaaagaaagaaggaccagtggcatctcctccttttatggatttggaacaagctgttcttcctgctgtgataccaaagaaagagaagcctgaactgtcagagccttcacatctaaatgggccgtcttctgacccggaggccgcttttttaagtagggatgtggatgatggttccggtagtccacactcgccccatcagctgagctcaaagagccttcctagccagaatctaagtcaaagccttagtaattcatttaactcctcttacatgagtagcgacaatgagtcagatatcgaagatgaagacttaaagttagagctgcgacgactacgagataaacatctcaaagagattcaggacctgcagagtcgccagaagcatgaaattgaatctttgtataccaaactgggcaaggtgccccctgctgttattattcccccagctgctcccctttcagggagaagacgacgacccactaaaagcaaaggcagcaaatctagtcgaagcagttccttggggaataaaagcccccagctttcaggtaacctgtctggtcagagtgcagcttcagtcttgcacccccagcagaccctccaccctcctggcaacatcccagagtccgggcagaatcagctgttacagccccttaagccatctccctccagtgacaacctctattcagccttcaccagtgatggtgccatttcagtaccaagcctttctgctccaggtcaaggaaccagcagcacaaacactgttggggcaacagtgaacagccaagccgcccaagctcagcctcctgccatgacgtccagcaggaagggcacattcacagatgacttgcacaagttggtagacaattgggcccgagatgccatgaatctctcaggcaggagaggaagcaaagggcacatgaattatgagggccctggaatggcaaggaagttctctgcacctgggcaactgtgcatctccatgacctcgaacctgggtggctctgcccccatctctgcagcatcagctacctctctaggtcacttcaccaagtctatgtgccccccacagcagtatggctttccagctaccccatttggcgctcaatggagtgggacgggtggcccagcaccacagccacttggccagttccaacctgtgggaactgcctccttgcagaatttcaacatcagcaatttgcagaaatccatcagcaaccccccaggctccaacctgcggaccacttag

SEQ ID NO: 146 - protein, 2141 aa, Homo Sapiens
  VARIANT 736, 1567: Xaa = Any Amino Acid
MDKDSRGAAATTTTTEHRFFRRSVICDSNATALELPGLPLSLPQPSIPAAVPQSAPPEPHREETVTATATSQVAQQPPAAAAPGEQAVAGPAPSTVPSSTSKDRPVSQPSLVGSKEEPPPARSGSGGGSAKEPQEERSQQQDDIEELETKAVGMSNDGRFLKFDIEIGRGSFKTVYKGLDTETTVEVAWCELQDRKLTKSERQRFKEEAEMLKGLQHPNIVRFYDSWESTVKGKKCIVLVTELMTSGTLKTYLKRFKVMKIKVLRSWCRQILKGLQFLHTRTPPIIHRDLKCDNIFITGPTGSVKIGDLGLATLKRASFAKSVIGTPEFMAPEMYEEKYDESVDVYAFGMCMLEMATSEYPYSECQNAAQIYRRVTSGVKPASFDKVAIPEVKEIIEGCIRQNKDERYSIKDLLNHAFFQEETGVRVELAEEDDGEKIAIKLWLRIEDIKKLKGKYKDNEAIEFSFDLERDVPEDVAQEMVESGYVCEGDHKTMAKAIKDRVSLIKRKREQRQLVREEQEKKKQEESSLKQQVEQSSASQTGIKQLPSASTGIPTASTTSASVSTQVEPEEPEADQHQQLQYQQPSISVLSDGTVDSGQGSSVFTESRVSSQQTVSYGSQHEQAHSTGTVPGHIPSTVQAQSQPHGVYPPSSVQQGIQQTAPPQQTVQYSLSQTSTSSEATTAQPVSQPQAPQVLPQVSAGKQGFPPRLPPQYPGDSNIAPSSNVASVCIHSTVLXPPMPTEVLATPGYFPTVVQPYVESNLLVPMGGVGGQVQVSQPGGSLAQAPTTSSQQAVLESTQGVSQVAPAEPVAVAQPQATQPTTLASSVDSAHSDVASGMSDGNENVPSSSGRHEGRTTKRHYRKSVRSRSRHEKTSRPKLRILNVSNKGDRVVECQLETHNRKMVTFKFDLDGDNPEEIATIMVNNDFILAIERESFVDQVREIIEKADEMLSEDVSVEPEGDQGLESLQGKDDYGFSGSQKLEGEFKQPIPASSMPQQIGIPTSSLTQVVHSAGRRFIVSPVPESRLRESKVFPSEITDTVAASTAQSPGMNLSHSASSLSLQQAFSELRRAQMTEGPNTAPPNFSHTGPTFPVVPPFLSSIAGVPTTAAATAPVPATSSPPNDISTSVIQSEVTVPTEEGIAGVATSTGVVTSGGLPIPPVSESPVLSSVVSSITIPAVVSISTTSPSLQVPTSTSEIVVSSTALYPSVTVSATSASAGGSTATPGPKPPAVVSQQAAGSTTVGATLTSVSTTTSFPSTASQLSIQLSSSTSTPTLAETVVVSAHSLDKTSHSSTTGLAFSLSAPSSSSSPGAGVSSYISQPGGLHPLVIPSVIASTPILPQAAGPTSTPLLPQVPSIPPLVQPVANVPAVQQTLIHSQPQPALLPNQPHTHCPEVDSDTQPKAPGIDDIKTLEEKLRSLFSEHSSSGAQHASVSLETSLVIESTVTPGIPTTAVAPSKLLTSTTSTCLPPTNLPLGTVALPVTPVVTPGQVSTPVSTTTSGVKPGTAPSKPPLTKAPVLPVGTELPAGTLPSEQLPPFPGPSLTQSQQPLEDLDAQLRRTLSPEXITVTSAVGPVSMAAPTAITEAGTQPQKGVSQVKEGPVLATSSGAGVFKMGRFQVSVAADGAQKEGKNKSEDAKSVHFESSTSESSVLSSSSPESTLVKPEPNGITIPGISSDVPESAHKTTASEAKSDTGQPTKVGRFQVTTTANKVGRFSVSKTEDKITDTKKEGPVASPPFMDLEQAVLPAVIPKKEKPELSEPSHLNGPSSDPEAAFLSRDVDDGSGSPHSPHQLSSKSLPSQNLSQSLSNSFNSSYMSSDNESDIEDEDLKLELRRLRDKHLKEIQDLQSRQKHEIESLYTKLGKVPPAVIIPPAAPLSGRRRRPTKSKGSKSSRSSSLGNKSPQLSGNLSGQSAASVLHPQQTLHPPGNIPESGQNQLLQPLKPSPSSDNLYSAFTSDGAISVPSLSAPGQGTSSTNTVGATVNSQAAQAQPPAMTSSRKGTFTDDLHKLVDNWARDAMNLSGRRGSKGHMNYEGPGMARKFSAPGQLCISMTSNLGGSAPISAASATSLGHFTKSMCPPQQYGFPATPFGAQWSGTGGPAPQPLGQFQPVGTASLQNFNISNLQKSISNPPGSNLRTT

SEQ ID NO: 147 - DNA, 6015 bp, Homo Sapiens
  CDS (1)...(6015)
atggacaaggacagccgtggggcggccgcgaccactaccaccactgagcaccgcttcttccgccggagcgtcatctgcgactccaatgccactgcactggagcttcccggccttcctctttccctgccccagcccagcatccccgcggctgtcccgcagagtgctccaccggagccccaccgggaagagaccgtgaccgccaccgccacttcccaggtagcccagcagcctccagccgctgccgcccctggggaacaggccgtcgcgggccctgccccctcgactgtccccagcagtaccagcaaagaccgcccagtgtcccagcctagccttgtggggagcaaagaggagccgccgccggcgagaagtggcagcggcggcggcagcgccaaggagccacaggaggaacggagccagcagcaggatgatatcgaagagctggagaccaaggccgtgggaatgtctaacgatggccgctttctcaagtttgacatcgaaatcggcagaggctcctttaagacggtctacaaaggtctggacactgaaaccaccgtggaagtcgcctggtgtgaactgcaggatcgaaaattaacaaagtctgagaggcagagatttaaagaagaagctgaaatgttaaaaggtcttcagcatcccaatattgttagattttatgattcctgggaatccacagtaaaaggaaagaagtgcattgttttggtgactgaacttatgacgtctggaacacttaaaacgtatctgaaaaggtttaaagtgatgaagatcaaagttctaagaagctggtgccgtcagatccttaaaggtcttcagtttcttcatactcgaactccacctatcattcaccgcgatcttaaatgtgacaacatctttatcaccggccctactggctcagtcaagattggagacctcggtctggcaaccctgaagcgggcttcttttgccaagagtgtgataggtaccccagagttcatggcccctgagatgtatgaggagaaatatgatgaatccgttgacgtttatgcttttgggatgtgcatgcttgagatggctacatctgaatatccttactcggagtgccaaaatgctgcacagatctaccgtcgcgtgaccagtggggtgaagccagccagttttgacaaagtagcaattcctgaagtgaaggaaattattgaaggatgcatacgacaaaacaaagatgaaagatattccatcaaagaccttttgaaccatgccttcttccaagaggaaacaggagtacgggtagaattagcagaagaagatgatggagaaaaaatagccataaaattatggctacgtattgaagatattaagaaattaaagggaaaatacaaagataatgaagctattgagttttcttttgatttagagagagatgtcccagaagatgttgcacaagaaatggtagagtctgggtatgtctgtgaaggtgatcacaagaccatggctaaagctatcaaagacagagtatcattaattaagaggaaacgagagcagcggcagttggtacgggaggagcaagaaaaaaaaaagcaggaagagagcagtctcaaacagcaggtagaacaatccagtgcttcccagacaggaatcaagcagctcccttctgctagcaccggcatacctactgcttctaccacttcagcttcagtttctacacaagtagaacctgaagaacctgaggcagatcaacatcaacaactacagtaccagcaacccagtatatctgtgttatctgatgggacggttgacagtggtcagggatcctctgtcttcacagaatctcgagtgagcagccaacagacagtttcatatggttcccaacatgaacaggcacattctacaggcacagtcccagggcatataccttctactgtccaagcacagtctcagccccatggggtatatccaccctcaagtgtgcagcagggaatacagcagacagcccctcctcaacagacagtgcagtattcactttcacagacatcaacctccagtgaggccactactgcacagccagtgagtcagcctcaagctccacaagtcttgcctcaagtatcagctggaaaacagggcttcccacctcgactgccaccacagtacccaggagattcaaatattgctccctcttccaacgtggcttctgtttgcatccattctacagtcctawcccctcccatgccgacagaagtactggctacacctgggtactttcccacagtggtgcagccttatgtggaatcaaatcttttagttcctatgggtggtgtaggaggacaggttcaagtgtcccagccaggagggagtttagcacaagcccccactacatcctcccagcaagcagttttggagagtactcagggagtctctcaggttgctcctgcagagccagttgcagtagcacagccccaagctacccagccgaccactttggcttcctctgtagacagtgcacattcagatgttgcttcaggtatgagtgatggcaatgagaacgtcccatcttccagtggaaggcatgaaggaagaactacaaaacggcattaccgaaaatctgtaaggagtcgctctcgacatgaaaaaacttcacgcccaaaattaagaattttgaatgtttcaaataaaggagaccgagtagtagaatgtcaattagagactcataataggaaaatggttacattcaaatttgacctagatggtgacaaccccgaggagatagcaacaattatggtgaacaatgactttattctagcaatagagagagagtcgtttgtggatcaagtgcgagaaattattgaaaaagctgatgaaatgctcagtgaggatgtcagtgtggaaccagagggtgatcagggattggagagtctacaaggaaaggatgactatggcttttcaggttctcagaaattggaaggagagttcaaacaaccaattcctgcgtcttccatgccacagcaaataggcattcctaccagttctttaactcaagttgttcattctgcgggaaggcggtttatagtgagtcctgtgccagaaagccgattacgagaatcaaaagttttccccagtgaaataacagatacagttgctgcctctacagctcagagccctggaatgaacttgtctcactctgcatcatcccttagtctacaacaggccttttctgaacttagacgtgcccaaatgacagaaggacccaayacagcacctccaaactttagtcatacaggaccaacatttccagtagtacctcctttcttaagtagcattgctggagtcccaaccacagcagcagccacagcaccagtccctgcaacaagcagccctcctaatgacatttccacatcagtaattcagtctgaggttacagtgcccactgaagaggggattgctggagttgccaccagcacaggtgtggtaacttcaggtggtctccccataccacctgtgtctgaatcaccagtactttccagcgtagtttcaagtatcacaatacctgcagttgtctcaatatctactacatccccgtcacttcaagtccccacatccacatctgagatcgttgtttctagtacagcactgtatccttcagtaacagtttcagcaacttcagcctctgcagggggcagtactgctaccccaggtcctaagcctccagctgtagtatctcagcaggcagcaggcagcactactgtgggagccacattaacatcagtttctaccaccacttcattcccaagcacagcttcacagctgtccattcagcttagcagcagtacttctactcctactttagctgaaaccgtggtagttagcgcacactcactagataagacatctcatagcagtacaactggattggctttctccctctctgcaccatcttcctcttcctctcctggagcaggagtgtctagttatatttctcagcctggtgggctgcatcctttggtcattccatcagtgatagcttctactcctattcttccccaagcagcaggacctacttctacacctttattaccccaagtacctagtatcccacccttggtacagcctgttgccaatgtgcctgctgtacagcagacactaattcatagtcagcctcaaccagctttgcttcccaaccagccccatactcattgtcctgaagtagattctgatacacaacccaaagctcctggaattgatgacataaagactctagaagaaaagctgcggtctctgttcagtgaacacagctcatctggagctcagcatgcctctgtctcactggagacctcactagtcatagagagcactgtcacaccaggcatcccaactactgctgttgcaccaagcaaactcctgacttctaccacaagtacttgcttaccaccaaccaatttaccactaggaacagttgctttgccagttacaccagtggtcacacctgggcaagtttctaccccagtcagcactactacatcaggagtgaaacctggaactgctccctccaagccacctctaactaaggctccggtgctgccagtgggtactgaacttccagcaggtactctacccagcgagcagctgccaccttttccaggaccttctctaacccagtcccagcaacctctagaggatcttgatgctcaattgagaagaacacttagtccagagatkatcacagtgacttctgcggttggtcctgtgtccatggcggctccaacagcaatcacagaagcaggaacacagcctcagaagggtgtttctcaagtcaaagaaggccctgtcctagcaactagttcaggagctggtgtttttaagatgggacgatttcaggtttctgttgcagcagacggtgcccagaaagagggtaaaaataagtcagaagatgcaaagtctgttcattttgaatccagcacctcagagtcctcagtgctatcaagtagtagtccagagagtaccttggtgaaaccagagccgaatggcataaccatccctggtatctcttcagatgtgccagagagtgcccacaaaactactgcctcagaggcaaagtcagacactgggcagcctaccaaggttggacgttttcaggtgacaactacagcaaacaaagtgggtcgtttctctgtatcaaaaactgaggacaagatcactgacacaaagaaagaaggaccagtggcatctcctccttttatggatttggaacaagctgttcttcctgctgtgataccaaagaaagagaagcctgaactgtcagagccttcacatctaaatgggccgtcttctgacccggaggccgcttttttaagtagggatgtggatgatggttccggtagtccacactcgccccatcagctgagctcaaagagccttcctagccagaatctaagtcaaagccttagtaattcatttaactcctcttacatgagtagcgacaatgagtcagatatcgaagatgaagacttaaagttagagctgcgacgactacgagataaacatctcaaagagattcaggacctgcagagtcgccagaagcatgaaattgaatctttgtataccaaactgggcaaggtgccccctgctgttattattcccccagctgctcccctttcagggagaagacgacgacccactaaaagcaaaggcagcaaatctagtcgaagcagttccttggggaataaaagcccccagctttcaggtaacctgtctggtcagagtgcagcttcagtcttgcacccccagcagaccctccaccctcctggcaacatcccagagtccgggcagaatcagctgttacagccccttaagccatctccctccagtgacaacctctattcagccttcaccagtgatggtgccatttcagtaccaagcctttctgctccaggtcaaggaataaagcaaccatcatcgtccaaaaacaataaaatggagatgttgccatacctgggacaaaagcctgttaaggcgggttgggagactagctga

SEQ ID NO: 148 - protein, 2004 aa, Homo Sapiens
  VARIANT 736, 1567: Xaa = Any Amino Acid
MDKDSRGAAATTTTTEHRFFRRSVICDSNATALELPGLPLSLPQPSIPAAVPQSAPPEPHREETVTATATSQVAQQPPAAAAPGEQAVAGPAPSTVPSSTSKDRPVSQPSLVGSKEEPPPARSGSGGGSAKEPQEERSQQQDDIEELETKAVGMSNDGRFLKFDIEIGRGSFKTVYKGLDTETTVEVAWCELQDRKLTKSERQRFKEEAEMLKGLQHPNIVRFYDSWESTVKGKKCIVLVTELMTSGTLKTYLKRFKVMKIKVLRSWCRQILKGLQFLHTRTPPIIHRDLKCDNIFITGPTGSVKIGDLGLATLKRASFAKSVIGTPEFMAPEMYEEKYDESVDVYAFGMCMLEMATSEYPYSECQNAAQIYRRVTSGVKPASFDKVAIPEVKEIIEGCIRQNKDERYSIKDLLNHAFFQEETGVRVELAEEDDGEKIAIKLWLRIEDIKKLKGKYKDNEAIEFSFDLERDVPEDVAQEMVESGYVCEGDHKTMAKAIKDRVSLIKRKREQRQLVREEQEKKKQEESSLKQQVEQSSASQTGIKQLPSASTGIPTASTTSASVSTQVEPEEPEADQHQQLQYQQPSISVLSDGTVDSGQGSSVFTESRVSSQQTVSYGSQHEQAHSTGTVPGHIPSTVQAQSQPHGVYPPSSVQQGIQQTAPPQQTVQYSLSQTSTSSEATTAQPVSQPQAPQVLPQVSAGKQGFPPRLPPQYPGDSNIAPSSNVASVCIHSTVLXPPMPTEVLATPGYFPTVVQPYVESNLLVPMGGVGGQVQVSQPGGSLAQAPTTSSQQAVLESTQGVSQVAPAEPVAVAQPQATQPTTLASSVDSAHSDVASGMSDGNENVPSSSGRHEGRTTKRHYRKSVRSRSRHEKTSRPKLRILNVSNKGDRVVECQLETHNRKMVTFKFDLDGDNPEEIATIMVNNDFILAIERESFVDQVREIIEKADEMLSEDVSVEPEGDQGLESLQGKDDYGFSGSQKLEGEFKQPIPASSMPQQIGIPTSSLTQVVHSAGRRFIVSPVPESRLRESKVFPSEITDTVAASTAQSPGMNLSHSASSLSLQQAFSELRRAQMTEGPNTAPPNFSHTGPTFPVVPPFLSSIAGVPTTAAATAPVPATSSPPNDISTSVIQSEVTVPTEEGIAGVATSTGVVTSGGLPIPPVSESPVLSSVVSSITIPAVVSISTTSPSLQVPTSTSEIVVSSTALYPSVTVSATSASAGGSTATPGPKPPAVVSQQAAGSTTVGATLTSVSTTTSFPSTASQLSIQLSSSTSTPTLAETVVVSAHSLDKTSHSSTTGLAFSLSAPSSSSSPGAGVSSYISQPGGLHPLVIPSVIASTPILPQAAGPTSTPLLPQVPSIPPLVQPVANVPAVQQTLIHSQPQPALLPNQPHTHCPEVDSDTQPKAPGIDDIKTLEEKLRSLFSEHSSSGAQHASVSLETSLVIESTVTPGIPTTAVAPSKLLTSTTSTCLPPTNLPLGTVALPVTPVVTPGQVSTPVSTTTSGVKPGTAPSKPPLTKAPVLPVGTELPAGTLPSEQLPPFPGPSLTQSQQPLEDLDAQLRRTLSPEXITVTSAVGPVSMAAPTAITEAGTQPQKGVSQVKEGPVLATSSGAGVFKMGRFQVSVAADGAQKEGKNKSEDAKSVHFESSTSESSVLSSSSPESTLVKPEPNGITIPGISSDVPESAHKTTASEAKSDTGQPTKVGRFQVTTTANKVGRFSVSKTEDKITDTKKEGPVASPPFMDLEQAVLPAVIPKKEKPELSEPSHLNGPSSDPEAAFLSRDVDDGSGSPHSPHQLSSKSLPSQNLSQSLSNSFNSSYMSSDNESDIEDEDLKLELRRLRDKHLKEIQDLQSRQKHEIESLYTKLGKVPPAVIIPPAAPLSGRRRRPTKSKGSKSSRSSSLGNKSPQLSGNLSGQSAASVLHPQQTLHPPGNIPESGQNQLLQPLKPSPSSDNLYSAFTSDGAISVPSLSAPGQGIKQPSSSKNNKMEMLPYLGQKPVKAGWETS

SEQ ID NO: 149 - DNA, 2226 bp, Homo Sapiens
  CDS (1)...(2226)
atggacaaggacagccgtggggcggccgcgaccactaccaccactgagcaccgcttcttccgccggagcgtcatctgcgactccaatgccactgcactggagcttcccggccttcctctttccctgccccagcccagcatccccgcggctgtcccgcagagtgctccaccggagccccaccgggaagagaccgtgaccgccaccgccacttcccaggtagcccagcagcctccagccgctgccgcccctggggaacaggccgtcgcgggccctgccccctcgactgtccccagcagtaccagcaaagaccgcccagtgtcccagcctagccttgtggggagcaaagaggagccgccgccggcgagaagtggcagcggcggcggcagcgccaaggagccacaggaggaacggagccagcagcaggatgatatcgaagagctggagaccaaggccgtgggaatgtctaacgatggccgctttctcaagtttgacatcgaaatcggcagaggctcctttaagacggtctacaaaggtctggacactgaaaccaccgtggaagtcgcctggtgtgaactgcaggatcgaaaattaacaaagtctgagaggcagagatttaaagaagaagctgaaatgttaaaaggtcttcagcatcccaatattgttagattttatgattcctgggaatccacagtaaaaggaaagaagtgcattgttttggtgactgaacttatgacgtctggaacacttaaaacgtatctgaaaaggtttaaagtgatgaagatcaaagttctaagaagctggtgccgtcagatccttaaaggtcttcagtttcttcatactcgaactccacctatcattcaccgcgatcttaaatgtgacaacatctttatcaccggccctactggctcagtcaagattggagacctcggtctggcaaccctgaagcgggcttcttttgccaagagtgtgataggtaccccagagttcatggcccctgagatgtatgaggagaaatatgatgaatccgttgacgtttatgcttttgggatgtgcatgcttgagatggctacatctgaatatccttactcggagtgccaaaatgctgcacagatctaccgtcgcgtgaccagtggggtgaagccagccagttttgacaaagtagcaattcctgaagtgaaggaaattattgaaggatgcatacgacaaaacaaagatgaaagatattccatcaaagaccttttgaaccatgccttcttccaagaggaaacaggagtacgggtagaattagcagaagaagatgatggagaaaaaatagccataaaattatggctacgtattgaagatattaagaaattaaagggaaaatacaaagataatgaagctattgagttttcttttgatttagagagagatgtcccagaagatgttgcacaagaaatggtagagtctgggtatgtctgtgaaggtgatcacaagaccatggctaaagctatcaaagacagagtatcattaattaagaggaaacgagagcagcggcagttggtacgggaggagcaagaaaaaaaaaagcaggaagagagcagtctcaaacagcaggtagaacaatccagtgcttcccagacaggaatcaagcagctcccttctgctagcaccggcatacctactgcttctaccacttcagcttcagtttctacacaagtagaacctgaagaacctgaggcagatcaacatcaacaactacagtaccagcaacccagtatatctgtgttatctgatgggacggttgacagtggtcagggatcctctgtcttcacagaatctcgagtgagcagccaacagacagtttcatatggttcccaacatgaacaggcacattctacaggcacagtcccagggcatataccttctactgtccaagcacagtctcagccccatggggtatatccaccctcaagtgtgcagcagggaatacagcagacagcccctcctcaacagacagtgcagtattcactttcacagacatcaacctccagtgaggccactactgcacagccagtgagtcagcctcaagctccacaagtcttgcctcaagtatcagctggaaaacagggcttcccacctcgactgccaccacagtacccaggagattcaaatattgctccctcttccaacgtggcttctgtttgcatccattctacagtcctawcccctataccttctgcataa

SEQ ID NO: 150 - protein, 741 aa, Homo Sapiens
  VARIANT 736: Xaa = Any Amino Acid
MDKDSRGAAATTTTTEHRFFRRSVICDSNATALELPGLPLSLPQPSIPAAVPQSAPPEPHREETVTATATSQVAQQPPAAAAPGEQAVAGPAPSTVPSSTSKDRPVSQPSLVGSKEEPPPARSGSGGGSAKEPQEERSQQQDDIEELETKAVGMSNDGRFLKFDIEIGRGSFKTVYKGLDTETTVEVAWCELQDRKLTKSERQRFKEEAEMLKGLQHPNIVRFYDSWESTVKGKKCIVLVTELMTSGTLKTYLKRFKVMKIKVLRSWCRQILKGLQFLHTRTPPIIHRDLKCDNIFITGPTGSVKIGDLGLATLKRASFAKSVIGTPEFMAPEMYEEKYDESVDVYAFGMCMLEMATSEYPYSECQNAAQIYRRVTSGVKPASFDKVAIPEVKEIIEGCIRQNKDERYSIKDLLNHAFFQEETGVRVELAEEDDGEKIAIKLWLRIEDIKKLKGKYKDNEAIEFSFDLERDVPEDVAQEMVESGYVCEGDHKTMAKAIKDRVSLIKRKREQRQLVREEQEKKKQEESSLKQQVEQSSASQTGIKQLPSASTGIPTASTTSASVSTQVEPEEPEADQHQQLQYQQPSISVLSDGTVDSGQGSSVFTESRVSSQQTVSYGSQHEQAHSTGTVPGHIPSTVQAQSQPHGVYPPSSVQQGIQQTAPPQQTVQYSLSQTSTSSEATTAQPVSQPQAPQVLPQVSAGKQGFPPRLPPQYPGDSNIAPSSNVASVCIHSTVLXPIPSA

SEQ ID NO: 151 - DNA, 6147 bp, Homo Sapiens
  CDS (1)...(6147)
atggacaaggacagccgtggggcggccgcgaccactaccaccactgagcaccgcttcttccgccggagcgtcatctgcgactccaatgccactgcactggagcttcccggccttcctctttccctgccccagcccagcatccccgcggctgtcccgcagagtgctccaccggagccccaccgggaagagaccgtgaccgccaccgccacttcccaggtagcccagcagcctccagccgctgccgcccctggggaacaggccgtcgcgggccctgccccctcgactgtccccagcagtaccagcaaagaccgcccagtgtcccagcctagccttgtggggagcaaagaggagccgccgccggcgagaagtggcagcggcggcggcagcgccaaggagccacaggaggaacggagccagcagcaggatgatatcgaagagctggagaccaaggccgtgggaatgtctaacgatggccgctttctcaagtttgacatcgaaatcggcagaggctcctttaagacggtctacaaaggtctggacactgaaaccaccgtggaagtcgcctggtgtgaactgcaggatcgaaaattaacaaagtctgagaggcagagatttaaagaagaagctgaaatgttaaaaggtcttcagcatcccaatattgttagattttatgattcctgggaatccacagtaaaaggaaagaagtgcattgttttggtgactgaacttatgacgtctggaacacttaaaacgtatctgaaaaggtttaaagtgatgaagatcaaagttctaagaagctggtgccgtcagatccttaaaggtcttcagtttcttcatactcgaactccacctatcattcaccgcgatcttaaatgtgacaacatctttatcaccggccctactggctcagtcaagattggagacctcggtctggcaaccctgaagcgggcttcttttgccaagagtgtgataggtaccccagagttcatggcccctgagatgtatgaggagaaatatgatgaatccgttgacgtttatgcttttgggatgtgcatgcttgagatggctacatctgaatatccttactcggagtgccaaaatgctgcacagatctaccgtcgcgtgaccagtggggtgaagccagccagttttgacaaagtagcaattcctgaagtgaaggaaattattgaaggatgcatacgacaaaacaaagatgaaagatattccatcaaagaccttttgaaccatgccttcttccaagaggaaacaggagtacgggtagaattagcagaagaagatgatggagaaaaaatagccataaaattatggctacgtattgaagatattaagaaattaaagggaaaatacaaagataatgaagctattgagttttcttttgatttagagagagatgtcccagaagatgttgcacaagaaatggtagagtctgggtatgtctgtgaaggtgatcacaagaccatggctaaagctatcaaagacagagtatcattaattaagaggaaacgagagcagcggcagttggtacgggaggagcaagaaaaaaaaaagcaggaagagagcagtctcaaacagcaggtagaacaatccagtgcttcccagacaggaatcaagcagctcccttctgctagcaccggcatacctactgcttctaccacttcagcttcagtttctacacaagtagaacctgaagaacctgaggcagatcaacatcaacaactacagtaccagcaacccagtatatctgtgttatctgatgggacggttgacagtggtcagggatcctctgtcttcacagaatctcgagtgagcagccaacagacagtttcatatggttcccaacatgaacaggcacattctacaggcacagtcccagggcatataccttctactgtccaagcacagtctcagccccatggggtatatccaccctcaagtgtgcagcagggaatacagcagacagcccctcctcaacagacagtgcagtattcactttcacagacatcaacctccagtgaggccactactgcacagccagtgagtcagcctcaagctccacaagtcttgcctcaagtatcagctggaaaacagagtactcagggagtctctcaggttgctcctgcagagccagttgcagtagcacagccccaagctacccagccgaccactttggcttcctctgtagacagtgcacattcagatgttgcttcaggtatgagtgatggcaatgagaacgtcccatcttccagtggaaggcatgaaggaagaactacaaaacggcattaccgaaaatctgtaaggagtcgctctcgacatgaaaaaacttcacgcccaaaattaagaattttgaatgtttcaaataaaggagaccgagtagtagaatgtcaattagagactcataataggaaaatggttacattcaaatttgacctagatggtgacaaccccgaggagatagcaacaattatggtgaacaatgactttattctagcaatagagagagagtcgtttgtggatcaagtgcgagaaattattgaaaaagctgatgaaatgctcagtgaggatgtcagtgtggaaccagagggtgatcagggattggagagtctacaaggaaaggatgactatggcttttcaggttctcagaaattggaaggagagttcaaacaaccaattcctgcgtcttccatgccacagcaaataggcattcctaccagttctttaactcaagttgttcattctgcgggaaggcggtttatagtgagtcctgtgccagaaagccgattacgagaatcaaaagttttccccagtgaaataacagatacagttgctgcctctacagctcagagccctggaatgaacttgtctcactctgcatcatcccttagtctacaacaggccttttctgaacttagacgtgcccaaatgacagaaggacccaayacagcacctccaaactttagtcatacaggaccaacatttccagtagtacctcctttcttaagtagcattgctggagtcccaaccacagcagcagccacagcaccagtccctgcaacaagcagccctcctaatgacatttccacatcagtaattcagtctgaggttacagtgcccactgaagaggggattgctggagttgccaccagcacaggtgtggtaacttcaggtggtctccccataccacctgtgtctgaatcaccagtactttccagcgtagtttcaagtatcacaatacctgcagttgtctcaatatctactacatccccgtcacttcaagtccccacatccacatctgagatcgttgtttctagtacagcactgtatccttcagtaacagtttcagcaacttcagcctctgcagggggcagtactgctaccccaggtcctaagcctccagctgtagtatctcagcaggcagcaggcagcactactgtgggagccacattaacatcagtttctaccaccacttcattcccaagcacagcttcacagctgtccattcagcttagcagcagtacttctactcctactttagctgaaaccgtggtagttagcgcacactcactagataagacatctcatagcagtacaactggattggctttctccctctctgcaccatcttcctcttcctctcctggagcaggagtgtctagttatatttctcagcctggtgggctgcatcctttggtcattccatcagtgatagcttctactcctattcttccccaagcagcaggacctacttctacacctttattaccccaagtacctagtatcccacccttggtacagcctgttgccaatgtgcctgctgtacagcagacactaattcatagtcagcctcaaccagctttgcttcccaaccagccccatactcattgtcctgaagtagattctgatacacaacccaaagctcctggaattgatgacataaagactctagaagaaaagctgcggtctctgttcagtgaacacagctcatctggagctcagcatgcctctgtctcactggagacctcactagtcatagagagcactgtcacaccaggcatcccaactactgctgttgcaccaagcaaactcctgacttctaccacaagtacttgcttaccaccaaccaatttaccactaggaacagttgctttgccagttacaccagtggtcacacctgggcaagtttctaccccagtcagcactactacatcaggagtgaaacctggaactgctccctccaagccacctctaactaaggctccggtgctgccagtgggtactgaacttccagcaggtactctacccagcgagcagctgccaccttttccaggaccttctctaacccagtcccagcaacctctagaggatcttgatgctcaattgagaagaacacttagtccagagatkatcacagtgacttctgcggttggtcctgtgtccatggcggctccaacagcaatcacagaagcaggaacacagcctcagaagggtgtttctcaagtcaaagaaggccctgtcctagcaactagttcaggagctggtgtttttaagatgggacgatttcaggtttctgttgcagcagacggtgcccagaaagagggtaaaaataagtcagaagatgcaaagtctgttcattttgaatccagcacctcagagtcctcagtgctatcaagtagtagtccagagagtaccttggtgaaaccagagccgaatggcataaccatccctggtatctcttcagatgtgccagagagtgcccacaaaactactgcctcagaggcaaagtcagacactgggcagcctaccaaggttggacgttttcaggtgacaactacagcaaacaaagtgggtcgtttctctgtatcaaaaactgaggacaagatcactgacacaaagaaagaaggaccagtggcatctcctccttttatggatttggaacaagctgttcttcctgctgtgataccaaagaaagagaagcctgaactgtcagagccttcacatctaaatgggccgtcttctgacccggaggccgcttttttaagtagggatgtggatgatggttccggtagtccacactcgccccatcagctgagctcaaagagccttcctagccagaatctaagtcaaagccttagtaattcatttaactcctcttacatgagtagcgacaatgagtcagatatcgaagatgaagacttaaagttagagctgcgacgactacgagataaacatctcaaagagattcaggacctgcagagtcgccagaagcatgaaattgaatctttgtataccaaactgggcaaggtgccccctgctgttattattcccccagctgctcccctttcagggagaagacgacgacccactaaaagcaaaggcagcaaatctagtcgaagcagttccttggggaataaaagcccccagctttcaggtaacctgtctggtcagagtgcagcttcagtcttgcacccccagcagaccctccaccctcctggcaacatcccagagtccgggcagaatcagctgttacagccccttaagccatctccctccagtgacaacctctattcagccttcaccagtgatggtgccatttcagtaccaagcctttctgctccaggtcaaggaaccagcagcacaaacactgttggggcaacagtgaacagccaagccgcccaagctcagcctcctgccatgacgtccagcaggaagggcacattcacagatgacttgcacaagttggtagacaattgggcccgagatgccatgaatctctcaggcaggagaggaagcaaagggcacatgaattatgagggccctggaatggcaaggaagttctctgcacctgggcaactgtgcatctccatgacctcgaacctgggtggctctgcccccatctctgcagcatcagctacctctctaggtcacttcaccaagtctatgtgccccccacagcagtatggctttccagctaccccatttggcgctcaatggagtgggacgggtggcccagcaccacagccacttggccagttccaacctgtgggaactgcctccttgcagaatttcaacatcagcaatttgcagaaatccatcagcaaccccccaggctccaacctgcggaccacttag

SEQ ID NO: 152 - protein, 2048 aa, Homo Sapiens
  VARIANT 1474: Xaa = Any Amino Acid
MDKDSRGAAATTTTTEHRFFRRSVICDSNATALELPGLPLSLPQPSIPAAVPQSAPPEPHREETVTATATSQVAQQPPAAAAPGEQAVAGPAPSTVPSSTSKDRPVSQPSLVGSKEEPPPARSGSGGGSAKEPQEERSQQQDDIEELETKAVGMSNDGRFLKFDIEIGRGSFKTVYKGLDTETTVEVAWCELQDRKLTKSERQRFKEEAEMLKGLQHPNIVRFYDSWESTVKGKKCIVLVTELMTSGTLKTYLKRFKVMKIKVLRSWCRQILKGLQFLHTRTPPIIHRDLKCDNIFITGPTGSVKIGDLGLATLKRASFAKSVIGTPEFMAPEMYEEKYDESVDVYAFGMCMLEMATSEYPYSECQNAAQIYRRVTSGVKPASFDKVAIPEVKEIIEGCIRQNKDERYSIKDLLNHAFFQEETGVRVELAEEDDGEKIAIKLWLRIEDIKKLKGKYKDNEAIEFSFDLERDVPEDVAQEMVESGYVCEGDHKTMAKAIKDRVSLIKRKREQRQLVREEQEKKKQEESSLKQQVEQSSASQTGIKQLPSASTGIPTASTTSASVSTQVEPEEPEADQHQQLQYQQPSISVLSDGTVDSGQGSSVFTESRVSSQQTVSYGSQHEQAHSTGTVPGHIPSTVQAQSQPHGVYPPSSVQQGIQQTAPPQQTVQYSLSQTSTSSEATTAQPVSQPQAPQVLPQVSAGKQSTQGVSQVAPAEPVAVAQPQATQPTTLASSVDSAHSDVASGMSDGNENVPSSSGRHEGRTTKRHYRKSVRSRSRHEKTSRPKLRILNVSNKGDRVVECQLETHNRKMVTFKFDLDGDNPEEIATIMVNNDFILAIERESFVDQVREIIEKADEMLSEDVSVEPEGDQGLESLQGKDDYGFSGSQKLEGEFKQPIPASSMPQQIGIPTSSLTQVVHSAGRRFIVSPVPESRLRESKVFPSEITDTVAASTAQSPGMNLSHSASSLSLQQAFSELRRAQMTEGPNTAPPNFSHTGPTFPVVPPFLSSIAGVPTTAAATAPVPATSSPPNDISTSVIQSEVTVPTEEGIAGVATSTGVVTSGGLPIPPVSESPVLSSVVSSITIPAVVSISTTSPSLQVPTSTSEIVVSSTALYPSVTVSATSASAGGSTATPGPKPPAVVSQQAAGSTTVGATLTSVSTTTSFPSTASQLSIQLSSSTSTPTLAETVVVSAHSLDKTSHSSTTGLAFSLSAPSSSSSPGAGVSSYISQPGGLHPLVIPSVIASTPILPQAAGPTSTPLLPQVPSIPPLVQPVANVPAVQQTLIHSQPQPALLPNQPHTHCPEVDSDTQPKAPGIDDIKTLEEKLRSLFSEHSSSGAQHASVSLETSLVIESTVTPGIPTTAVAPSKLLTSTTSTCLPPTNLPLGTVALPVTPVVTPGQVSTPVSTTTSGVKPGTAPSKPPLTKAPVLPVGTELPAGTLPSEQLPPFPGPSLTQSQQPLEDLDAQLRRTLSPEXITVTSAVGPVSMAAPTAITEAGTQPQKGVSQVKEGPVLATSSGAGVFKMGRFQVSVAADGAQKEGKNKSEDAKSVHFESSTSESSVLSSSSPESTLVKPEPNGITIPGISSDVPESAHKTTASEAKSDTGQPTKVGRFQVTTTANKVGRFSVSKTEDKITDTKKEGPVASPPFMDLEQAVLPAVIPKKEKPELSEPSHLNGPSSDPEAAFLSRDVDDGSGSPHSPHQLSSKSLPSQNLSQSLSNSFNSSYMSSDNESDIEDEDLKLELRRLRDKHLKEIQDLQSRQKHEIESLYTKLGKVPPAVIIPPAAPLSGRRRRPTKSKGSKSSRSSSLGNKSPQLSGNLSGQSAASVLHPQQTLHPPGNIPESGQNQLLQPLKPSPSSDNLYSAFTSDGAISVPSLSAPGQGTSSTNTVGATVNSQAAQAQPPAMTSSRKGTFTDDLHKLVDNWARDAMNLSGRRGSKGHMNYEGPGMARKFSAPGQLCISMTSNLGGSAPISAASATSLGHFTKSMCPPQQYGFPATPFGAQWSGTGGPAPQPLGQFQPVGTASLQNFNISNLQKSISNPPGSNLRTT

SEQ ID NO: 153 - DNA, 5736 bp, Homo Sapiens
  CDS (1)...(5736)
atggacaaggacagccgtggggcggccgcgaccactaccaccactgagcaccgcttcttccgccggagcgtcatctgcgactccaatgccactgcactggagcttcccggccttcctctttccctgccccagcccagcatccccgcggctgtcccgcagagtgctccaccggagccccaccgggaagagaccgtgaccgccaccgccacttcccaggtagcccagcagcctccagccgctgccgcccctggggaacaggccgtcgcgggccctgccccctcgactgtccccagcagtaccagcaaagaccgcccagtgtcccagcctagccttgtggggagcaaagaggagccgccgccggcgagaagtggcagcggcggcggcagcgccaaggagccacaggaggaacggagccagcagcaggatgatatcgaagagctggagaccaaggccgtgggaatgtctaacgatggccgctttctcaagtttgacatcgaaatcggcagaggctcctttaagacggtctacaaaggtctggacactgaaaccaccgtggaagtcgcctggtgtgaactgcaggatcgaaaattaacaaagtctgagaggcagagatttaaagaagaagctgaaatgttaaaaggtcttcagcatcccaatattgttagattttatgattcctgggaatccacagtaaaaggaaagaagtgcattgttttggtgactgaacttatgacgtctggaacacttaaaacgtatctgaaaaggtttaaagtgatgaagatcaaagttctaagaagctggtgccgtcagatccttaaaggtcttcagtttcttcatactcgaactccacctatcattcaccgcgatcttaaatgtgacaacatctttatcaccggccctactggctcagtcaagattggagacctcggtctggcaaccctgaagcgggcttcttttgccaagagtgtgataggtaccccagagttcatggcccctgagatgtatgaggagaaatatgatgaatccgttgacgtttatgcttttgggatgtgcatgcttgagatggctacatctgaatatccttactcggagtgccaaaatgctgcacagatctaccgtcgcgtgaccagtggggtgaagccagccagttttgacaaagtagcaattcctgaagtgaaggaaattattgaaggatgcatacgacaaaacaaagatgaaagatattccatcaaagaccttttgaaccatgccttcttccaagaggaaacaggagtacgggtagaattagcagaagaagatgatggagaaaaaatagccataaaattatggctacgtattgaagatattaagaaattaaagggaaaatacaaagataatgaagctattgagttttcttttgatttagagagagatgtcccagaagatgttgcacaagaaatggtagagtctgggtatgtctgtgaaggtgatcacaagaccatggctaaagctatcaaagacagagtatcattaattaagaggaaacgagagcagcggcagttggtacgggaggagcaagaaaaaaaaaagcaggaagagagcagtctcaaacagcaggtagaacaatccagtgcttcccagacaggaatcaagcagctcccttctgctagcaccggcatacctactgcttctaccacttcagcttcagtttctacacaagtagaacctgaagaacctgaggcagatcaacatcaacaactacagtaccagcaacccagtatatctgtgttatctgatgggacggttgacagtggtcagggatcctctgtcttcacagaatctcgagtgagcagccaacagacagtttcatatggttcccaacatgaacaggcacattctacaggcacagtcccagggcatataccttctactgtccaagcacagtctcagccccatggggtatatccaccctcaagtgtgcagcagggaatacagcagacagcccctcctcaacagacagtgcagtattcactttcacagacatcaacctccagtgaggccactactgcacagccagtgagtcagcctcaagctccacaagtcttgcctcaagtatcagctggaaaacagagtactcagggagtctctcaggttgctcctgcagagccagttgcagtagcacagccccaagctacccagccgaccactttggcttcctctgtagacagtgcacattcagatgttgcttcaggtatgagtgatggcaatgagaacgtcccatcttccagtggaaggcatgaaggaagaactacaaaacggcattaccgaaaatctgtaaggagtcgctctcgacatgaaaaaacttcacgcccaaaattaagaattttgaatgtttcaaataaaggagaccgagtagtagaatgtcaattagagactcataataggaaaatggttacattcaaatttgacctagatggtgacaaccccgaggagatagcaacaattatggtgaacaatgactttattctagcaatagagagagagtcgtttgtggatcaagtgcgagaaattattgaaaaagctgatgaaatgctcagtgaggatgtcagtgtggaaccagagggtgatcagggattggagagtctacaaggaaaggatgactatggcttttcaggttctcagaaattggaaggagagttcaaacaaccaattcctgcgtcttccatgccacagcaaataggcattcctaccagttctttaactcaagttgttcattctgcgggaaggcggtttatagtgagtcctgtgccagaaagccgattacgagaatcaaaagttttccccagtgaaataacagatacagttgctgcctctacagctcagagccctggaatgaacttgtctcactctgcatcatcccttagtctacaacaggccttttctgaacttagacgtgcccaaatgacagaaggacccaayacagcacctccaaactttagtcatacaggaccaacatttccagtagtacctcctttcttaagtagcattgctggagtcccaaccacagcagcagccacagcaccagtccctgcaacaagcagccctcctaatgacatttccacatcagtaattcagtctgaggttacagtgcccactgaagaggggattgctggagttgccaccagcacaggtgtggtaacttcaggtggtctccccataccacctgtgtctgaatcaccagtactttccagcgtagtttcaagtatcacaatacctgcagttgtctcaatatctactacatccccgtcacttcaagtccccacatccacatctgagatcgttgtttctagtacagcactgtatccttcagtaacagtttcagcaacttcagcctctgcagggggcagtactgctaccccaggtcctaagcctccagctgtagtatctcagcaggcagcaggcagcactactgtgggagccacattaacatcagtttctaccaccacttcattcccaagcacagcttcacagctgtccattcagcttagcagcagtacttctactcctactttagctgaaaccgtggtagttagcgcacactcactagataagacatctcatagcagtacaactggattggctttctccctctctgcaccatcttcctcttcctctcctggagcaggagtgtctagttatatttctcagcctggtgggctgcatcctttggtcattccatcagtgatagcttctactcctattcttccccaagcagcaggacctacttctacacctttattaccccaagtacctagtatcccacccttggtacagcctgttgccaatgtgcctgctgtacagcagacactaattcatagtcagcctcaaccagctttgcttcccaaccagccccatactcattgtcctgaagtagattctgatacacaacccaaagctcctggaattgatgacataaagactctagaagaaaagctgcggtctctgttcagtgaacacagctcatctggagctcagcatgcctctgtctcactggagacctcactagtcatagagagcactgtcacaccaggcatcccaactactgctgttgcaccaagcaaactcctgacttctaccacaagtacttgcttaccaccaaccaatttaccactaggaacagttgctttgccagttacaccagtggtcacacctgggcaagtttctaccccagtcagcactactacatcaggagtgaaacctggaactgctccctccaagccacctctaactaaggctccggtgctgccagtgggtactgaacttccagcaggtactctacccagcgagcagctgccaccttttccaggaccttctctaacccagtcccagcaacctctagaggatcttgatgctcaattgagaagaacacttagtccagagatkatcacagtgacttctgcggttggtcctgtgtccatggcggctccaacagcaatcacagaagcaggaacacagcctcagaagggtgtttctcaagtcaaagaaggccctgtcctagcaactagttcaggagctggtgtttttaagatgggacgatttcaggtttctgttgcagcagacggtgcccagaaagagggtaaaaataagtcagaagatgcaaagtctgttcattttgaatccagcacctcagagtcctcagtgctatcaagtagtagtccagagagtaccttggtgaaaccagagccgaatggcataaccatccctggtatctcttcagatgtgccagagagtgcccacaaaactactgcctcagaggcaaagtcagacactgggcagcctaccaaggttggacgttttcaggtgacaactacagcaaacaaagtgggtcgtttctctgtatcaaaaactgaggacaagatcactgacacaaagaaagaaggaccagtggcatctcctccttttatggatttggaacaagctgttcttcctgctgtgataccaaagaaagagaagcctgaactgtcagagccttcacatctaaatgggccgtcttctgacccggaggccgcttttttaagtagggatgtggatgatggttccggtagtccacactcgccccatcagctgagctcaaagagccttcctagccagaatctaagtcaaagccttagtaattcatttaactcctcttacatgagtagcgacaatgagtcagatatcgaagatgaagacttaaagttagagctgcgacgactacgagataaacatctcaaagagattcaggacctgcagagtcgccagaagcatgaaattgaatctttgtataccaaactgggcaaggtgccccctgctgttattattcccccagctgctcccctttcagggagaagacgacgacccactaaaagcaaaggcagcaaatctagtcgaagcagttccttggggaataaaagcccccagctttcaggtaacctgtctggtcagagtgcagcttcagtcttgcacccccagcagaccctccaccctcctggcaacatcccagagtccgggcagaatcagctgttacagccccttaagccatctccctccagtgacaacctctattcagccttcaccagtgatggtgccatttcagtaccaagcctttctgctccaggtcaaggaataaagcaaccatcatcgtccaaaaacaataaaatggagatgttgccatacctgggacaaaagcctgttaaggcgggttgggagactagctga

SEQ ID NO: 154 - protein, 1911 aa, Homo Sapiens
  VARIANT 1474: Xaa = Any Amino Acid
MDKDSRGAAATTTTTEHRFFRRSVICDSNATALELPGLPLSLPQPSIPAAVPQSAPPEPHREETVTATATSQVAQQPPAAAAPGEQAVAGPAPSTVPSSTSKDRPVSQPSLVGSKEEPPPARSGSGGGSAKEPQEERSQQQDDIEELETKAVGMSNDGRFLKFDIEIGRGSFKTVYKGLDTETTVEVAWCELQDRKLTKSERQRFKEEAEMLKGLQHPNIVRFYDSWESTVKGKKCIVLVTELMTSGTLKTYLKRFKVMKIKVLRSWCRQILKGLQFLHTRTPPIIHRDLKCDNIFITGPTGSVKIGDLGLATLKRASFAKSVIGTPEFMAPEMYEEKYDESVDVYAFGMCMLEMATSEYPYSECQNAAQIYRRVTSGVKPASFDKVAIPEVKEIIEGCIRQNKDERYSIKDLLNHAFFQEETGVRVELAEEDDGEKIAIKLWLRIEDIKKLKGKYKDNEAIEFSFDLERDVPEDVAQEMVESGYVCEGDHKTMAKAIKDRVSLIKRKREQRQLVREEQEKKKQEESSLKQQVEQSSASQTGIKQLPSASTGIPTASTTSASVSTQVEPEEPEADQHQQLQYQQPSISVLSDGTVDSGQGSSVFTESRVSSQQTVSYGSQHEQAHSTGTVPGHIPSTVQAQSQPHGVYPPSSVQQGIQQTAPPQQTVQYSLSQTSTSSEATTAQPVSQPQAPQVLPQVSAGKQSTQGVSQVAPAEPVAVAQPQATQPTTLASSVDSAHSDVASGMSDGNENVPSSSGRHEGRTTKRHYRKSVRSRSRHEKTSRPKLRILNVSNKGDRVVECQLETHNRKMVTFKFDLDGDNPEEIATIMVNNDFILAIERESFVDQVREIIEKADEMLSEDVSVEPEGDQGLESLQGKDDYGFSGSQKLEGEFKQPIPASSMPQQIGIPTSSLTQVVHSAGRRFIVSPVPESRLRESKVFPSEITDTVAASTAQSPGMNLSHSASSLSLQQAFSELRRAQMTEGPNTAPPNFSHTGPTFPVVPPFLSSIAGVPTTAAATAPVPATSSPPNDISTSVIQSEVTVPTEEGIAGVATSTGVVTSGGLPIPPVSESPVLSSVVSSITIPAVVSISTTSPSLQVPTSTSEIVVSSTALYPSVTVSATSASAGGSTATPGPKPPAVVSQQAAGSTTVGATLTSVSTTTSFPSTASQLSIQLSSSTSTPTLAETVVVSAHSLDKTSHSSTTGLAFSLSAPSSSSSPGAGVSSYISQPGGLHPLVIPSVIASTPILPQAAGPTSTPLLPQVPSIPPLVQPVANVPAVQQTLIHSQPQPALLPNQPHTHCPEVDSDTQPKAPGIDDIKTLEEKLRSLFSEHSSSGAQHASVSLETSLVIESTVTPGIPTTAVAPSKLLTSTTSTCLPPTNLPLGTVALPVTPVVTPGQVSTPVSTTTSGVKPGTAPSKPPLTKAPVLPVGTELPAGTLPSEQLPPFPGPSLTQSQQPLEDLDAQLRRTLSPEXITVTSAVGPVSMAAPTAITEAGTQPQKGVSQVKEGPVLATSSGAGVFKMGRFQVSVAADGAQKEGKNKSEDAKSVHFESSTSESSVLSSSSPESTLVKPEPNGITIPGISSDVPESAHKTTASEAKSDTGQPTKVGRFQVTTTANKVGRFSVSKTEDKITDTKKEGPVASPPFMDLEQAVLPAVIPKKEKPELSEPSHLNGPSSDPEAAFLSRDVDDGSGSPHSPHQLSSKSLPSQNLSQSLSNSFNSSYMSSDNESDIEDEDLKLELRRLRDKHLKEIQDLQSRQKHEIESLYTKLGKVPPAVIIPPAAPLSGRRRRPTKSKGSKSSRSSSLGNKSPQLSGNLSGQSAASVLHPQQTLHPPGNIPESGQNQLLQPLKPSPSSDNLYSAFTSDGAISVPSLSAPGQGIKQPSSSKNNKMEMLPYLGQKPVKAGWETS

SEQ ID NO: 155 - DNA, 717 bp, Homo Sapiens
  CDS (1)...(717)
atgatgcttggacttgaatcacttccagatcccacagacacctgggaaattatagagaccattggtaaaggcacctatggcaaagtctacaaggtaactaacaagagagatgggagcctggctgcagtgaaaattctggatccagtcagtgatatggatgaagaaattgaggcagaatacaacattttgcagttccttcctaatcatcccaatgttgtaaagttttatgggatgttttacaaagcggatcactgtgtagggggacagctgtggctggtcctggagctgtgtaatgggggctcagtcacygagcttgtcaaaggtctactcagatgtggccagcggttggatgaagcaatgatctcatacatcttgtacggggccctcttgggccttcagcatttgcacaacaaccgaatcatccaccgtgatgtgaaggggaataacattcttctgacaacagaaggaggagttaagctcgttgactttggtgtttcagctcaactcaccagtacacgtctgcggagaaacacatctgttggcaccccattctggatggcccctgaggtcattgcctgtgagcagcagtatgactcttcctatgacgctcgctgtgacgtctggtccttggggatcacagctattgaactgggggatggagaccctcccctctttgacatgcatcctgtgaaaacactctttaagattccaaggtaa

SEQ ID NO: 156 - protein, 238 aa, Homo Sapiens
  VARIANT 103: Xaa = Any Amino Acid
MMLGLESLPDPTDTWEIIETIGKGTYGKVYKVTNKRDGSLAAVKILDPVSDMDEEIEAEYNILQFLPNHPNVVKFYGMFYKADHCVGGQLWLVLELCNGGSVXELVKGLLRCGQRLDEAMISYILYGALLGLQHLHNNRIIHRDVKGNNILLTTEGGVKLVDFGVSAQLTSTRLRRNTSVGTPFWMAPEVIACEQQYDSSYDARCDVWSLGITAIELGDGDPPLFDMHPVKTLFKIPR

SEQ ID NO: 157 - DNA, 3711 bp, Homo Sapiens
  CDS (1)...(3711)
atgatgcttggacttgaatcacttccagatcccacagacacctgggaaattatagagaccattggtaaaggcacctatggcaaagtctacaaggtaactaacaagagagatgggagcctggctgcagtgaaaattctggatccagtcagtgatatggatgaagaaattgaggcagaatacaacattttgcagttccttcctaatcatcccaatgttgtaaagttttatgggatgttttacaaagcggatcactgtgtagggggacagctgtggctggtcctggagctgtgtaatgggggctcagtcacygagcttgtcaaaggtctactcagatgtggccagcggttggatgaagcaatgatctcatacatcttgtacggggccctcttgggccttcagcatttgcacaacaaccgaatcatccaccgtgatgtgaaggggaataacattcttctgacaacagaaggaggagttaagctcgttgactttggtgtttcagctcaactcaccagtacacgtctgcggagaaacacatctgttggcaccccattctggatggcccctgaggtcattgcctgtgagcagcagtatgactcttcctatgacgctcgctgtgacgtctggtccttggggatcacagctattgaactgggggatggagaccctcccctctttgacatgcatcctgtgaaaacactctttaagattccaagaaatcctccacctactttacttcatccagaaaaatggtgtgaagaattcaaccactttatttcacagtgtcttattaaggattttgaaaggcgaccttccgtcacacatctccttgaccacccatttattaaaggagtacatggaaaagttctgtttctgcaaaaacagctggccraggttctccaagaccagaagcatcaaaatcctgttgctaaaaccaggcatgagaggatgcataccagaagaccttatcatgtggaagatgctgaaaaatactgccttgaggatgatttggtcaacctagaggttctggatgaggatacaattatccatcagttgcagaaacgttatgcagacttgctaatttacacatatgttggagacatcttaattgccttaaaccccttccagaatctaagcatatactctccacagttttccagactttatcatggggtgaaacgcgcctccaaycccccccacatatttgcatcagcagatgctgcttaccagtgcatggttactctcagcaaagaccagtgcattgtcatcagcggagagagtggctctgggaagacagaaagcgcccacctgattgttcarcatttgactttcttgggaaaggccaataatcagaccttgagagagaaaattctacaagtcaactccctggtggaagcctttgggaactcatgcactgccatcaatgacaactcgagccgttttggaaaatatctggaaatgatgtttacaccaactggagttgtgatgggggcaagaatctctgaatatctcctggaaaaatccagagttataaaacaggcagcgagagagaaaaattttcatatattttactatatttatgctggtcttcatcaccaaaagaagctttctgatttcagacttcctgaggaaaaacctcctaggtacatagctgatgaaactggaagggtgatgcacgacataacttccaaggagtcttacagaagacaattcgaagcaattcagcattgcttcaggattatagggttcacggacaaagaggtgcactcagtgtacagaattttggctgggattttgaatattgggaacattgagttcgcagctatttcctctcaacatcagactgataaaagtgaggtgcccaatgctgaagctttgcaaaatgctgcctctgttctgtgcattagccctgaagagctccaggaggccctcacctcccactgtgtggtcacccggggcgagaccatcatccgtgccaacactgtagacagggctgcggacgttcgagacgccatgtccaaagccctgtatgggaggctcttcagctggattgtgaatcgcattaatacactcctgcagccagacgaaaacatatgtagtgcaggaggtggaatgaatgtggggatcttggatatctttggattcgagaattttcagagaaattcatttgagcagctctgcataaacatcgccaatgagcaaatccagtactatttcaatcagcatgtttttgctcttgagcagatggaatatcagaatgaaggcattgatgctatacccgtggaatatgaggacaaccgcccgctcctggacatgttcctccagaaacccctgggactgcttgcacttttggatgaggaaagtcggtttccccaagcaactgaccagaccctggttgataaatttgaagataatctacgatgcaaatacttctggaggcccaaaggagtggaactgtgctttggcattcagcattatgctggaaaggtattatatgatgcttctggggttcttgagaaaaatagagacactctccctgccgatgtggttgtggtcctgagaacgtcagaaaacaagcttcttcagcagctcttctcaatccctctgaccaaaacaggtaatttggcccagacaagagctaggataacagtggcctcaagttctttgcctccacatttcagtgctgggaaagccaaggtggacactctggaggtgatacggcatccggaagaaaccaccaacatgaagaggcaaactgtggcttcttacttccggtattctctgatggacctgctctccaaaatggtggttggacagccccactttgtgcgctgcattaaacccaatgatgaccgagaggccctgcagttctctcgagagagggtgctggcccagctccgctccacagggattctggagacagtcagcatccgccgccagggctattcccaccgcatcctttttgaagaatttgtgaaaaggtattattacttggcattcacagcacatcaaacacctcttgctagcaaagagagctgtgtggctatcttggaaaagtccagattagatcactgggtgctgggaaaaacaaaggtttttctcaaatattaccatgttgagcaaytaaatttgctgcttcgagaagtcataggcagagtggttgtgctgcaggcatataccaaggggtggcttggagccaggagatacaaaaaggtcagagagaagagagagaagggagccattgccatccagtcagcctggagaggatatgatgctcggaggaaatttaagaaaataagcaacagaaggaatgagtctgctgctcataatcaagcaggggccacttcaaaccaaagcagtgggccacattcccccgtcgcagcaggtacgaggggaagtgccgaggttcaagactgcagcgagcctggtgaccataaagttctcaggggctctgtacatcgtaggagccattcacaagcagaatccaacaatggccgtacacagacttcaagcaactctcctgctgtcacagagaaaaatgggcattcacaagcccagagttctccaaaagggtgcgatatcttcgcaggacatgcaaacaaggtagctggatatcttgattccaaagtaaatgtgtatcactccttcagactcatccaagttcataggcatgaagcttgtctgcggctgcgtggttggaccatccaaacttga

SEQ ID NO: 158 - protein, 1236 aa, Homo Sapiens
  VARIANT 103, 297, 1041: Xaa = Any Amino Acid
MMLGLESLPDPTDTWEIIETIGKGTYGKVYKVTNKRDGSLAAVKILDPVSDMDEEIEAEYNILQFLPNHPNVVKFYGMFYKADHCVGGQLWLVLELCNGGSVXELVKGLLRCGQRLDEAMISYILYGALLGLQHLHNNRIIHRDVKGNNILLTTEGGVKLVDFGVSAQLTSTRLRRNTSVGTPFWMAPEVIACEQQYDSSYDARCDVWSLGITAIELGDGDPPLFDMHPVKTLFKIPRNPPPTLLHPEKWCEEFNHFISQCLIKDFERRPSVTHLLDHPFIKGVHGKVLFLQKQLAXVLQDQKHQNPVAKTRHERMHTRRPYHVEDAEKYCLEDDLVNLEVLDEDTIIHQLQKRYADLLIYTYVGDILIALNPFQNLSIYSPQFSRLYHGVKRASNPPHIFASADAAYQCMVTLSKDQCIVISGESGSGKTESAHLIVQHLTFLGKANNQTLREKILQVNSLVEAFGNSCTAINDNSSRFGKYLEMMFTPTGVVMGARISEYLLEKSRVIKQAAREKNFHIFYYIYAGLHHQKKLSDFRLPEEKPPRYIADETGRVMHDITSKESYRRQFEAIQHCFRIIGFTDKEVHSVYRILAGILNIGNIEFAAISSQHQTDKSEVPNAEALQNAASVLCISPEELQEALTSHCVVTRGETIIRANTVDRAADVRDAMSKALYGRLFSWIVNRINTLLQPDENICSAGGGMNVGILDIFGFENFQRNSFEQLCINIANEQIQYYFNQHVFALEQMEYQNEGIDAIPVEYEDNRPLLDMFLQKPLGLLALLDEESRFPQATDQTLVDKFEDNLRCKYFWRPKGVELCFGIQHYAGKVLYDASGVLEKNRDTLPADVVVVLRTSENKLLQQLFSIPLTKTGNLAQTRARITVASSSLPPHFSAGKAKVDTLEVIRHPEETTNMKRQTVASYFRYSLMDLLSKMVVGQPHFVRCIKPNDDREALQFSRERVLAQLRSTGILETVSIRRQGYSHRILFEEFVKRYYYLAFTAHQTPLASKESCVAILEKSRLDHWVLGKTKVFLKYYHVEQXNLLLREVIGRVVVLQAYTKGWLGARRYKKVREKREKGAIAIQSAWRGYDARRKFKKISNRRNESAAHNQAGATSNQSSGPHSPVAAGTRGSAEVQDCSEPGDHKVLRGSVHRRSHSQAESNNGRTQTSSNSPAVTEKNGHSQAQSSPKGCDIFAGHANKVAGYLDSKVNVYHSFRLIQVHRHEACLRLRGWTIQT

SEQ ID NO: 159 - DNA, 4034 bp, Homo Sapiens
  misc_feature 4026, 4027, 4029: n = A,T,C or G
ttttcaacaagatggagtcttgctctgtttcccagcctgtagtgcagtgacacagtcttggctcactgtaacctctgcctcctgggttcaagtgattctcctgcctcagcctcctgagtagctgggattacaggaaacatctgtatggattatttcactataatcctatgatgcttggacttgaatcacttccagatcccacagacacctgggaaattatagagaccattggtaaaggcacctatggcaaagtctacaaggtaactaacaagagagatgggagcctggctgcagtgaaaattctggatccagtcagtgatatggatgaagaaattgaggcagaatacaacattttgcagttccttcctaatcatcccaatgttgtaaagttttatgggatgttttacaaagcggatcactgtgtagggggacagctgtggctggtcctggagctgtgtaatgggggctcagtcacygagcttgtcaaaggtctactcagatgtggccagcggttggatgaagcaatgatctcatacatcttgtacggggccctcttgggccttcagcatttgcacaacaaccgaatcatccaccgtgatgtgaaggggaataacattcttctgacaacagaaggaggagttaagctcgttgactttggtgtttcagctcaactcaccagtacacgtctgcggagaaacacatctgttggcaccccattctggatggcccctgaggtcattgcctgtgagcagcagtatgactcttcctatgacgctcgctgtgacgtctggtccttggggatcacagctattgaactgggggatggagaccctcccctctttgacatgcatcctgtgaaaacactctttaagattccaagaaatcctccacctactttacttcatccagaaaaatggtgtgaagaattcaaccactttatttcacagtgtcttattaaggattttgaaaggcgaccttccgtcacacatctccttgaccacccatttattaaaggagtacatggaaaagttctgtttctgcaaaaacagctggccraggttctccaagaccagaagcatcaaaatcctgttgctaaaaccaggcatgagaggatgcataccagaagaccttatcatgtggaagatgctgaaaaatactgccttgaggatgatttggtcaacctagaggttctggatgaggatacaattatccatcagttgcagaaacgttatgcagacttgctaatttacacatatgttggagacatcttaattgccttaaaccccttccagaatctaagcatatactctccacagttttccagactttatcatggggtgaaacgcgcctccaaycccccccacatatttgcatcagcagatgctgcttaccagtgcatggttactctcagcaaagaccagtgcattgtcatcagcggagagagtggctctgggaagacagaaagcgcccacctgattgttcarcatttgactttcttgggaaaggccaataatcagaccttgagagagaaaattctacaagtcaactccctggtggaagcctttgggaactcatgcactgccatcaatgacaactcgagccgttttggaaaatatctggaaatgatgtttacaccaactggagttgtgatgggggcaagaatctctgaatatctcctggaaaaatccagagttataaaacaggcagcgagagagaaaaattttcatatattttactatatttatgctggtcttcatcaccaaaagaagctttctgatttcagacttcctgaggaaaaacctcctaggtacatagctgatgaaactggaagggtgatgcacgacataacttccaaggagtcttacagaagacaattcgaagcaattcagcattgcttcaggattatagggttcacggacaaagaggtgcactcagtgtacagaattttggctgggattttgaatattgggaacattgagttcgcagctatttcctctcaacatcagactgataaaagtgaggtgcccaatgctgaagctttgcaaaatgctgcctctgttctgtgcattagccctgaagagctccaggaggccctcacctcccactgtgtggtcacccggggcgagaccatcatccgtgccaacactgtagacagggctgcggacgttcgagacgccatgtccaaagccctgtatgggaggctcttcagctggattgtgaatcgcattaatacactcctgcagccagacgaaaacatatgtagtgcaggaggtggaatgaatgtggggatcttggatatctttggattcgagaattttcagagaaattcatttgagcagctctgcataaacatcgccaatgagcaaatccagtactatttcaatcagcatgtttttgctcttgagcagatggaatatcagaatgaaggcattgatgctatacccgtggaatatgaggacaaccgcccgctcctggacatgttcctccagaaacccctgggactgcttgcacttttggatgaggaaagtcggtttccccaagcaactgaccagaccctggttgataaatttgaagataatctacgatgcaaatacttctggaggcccaaaggagtggaactgtgctttggcattcagcattatgctggaaaggtattatatgatgcttctggggttcttgagaaaaatagagacactctccctgccgatgtggttgtggtcctgagaacgtcagaaaacaagcttcttcagcagctcttctcaatccctctgaccaaaacaggtaatttggcccagacaagagctaggataacagtggcctcaagttctttgcctccacatttcagtgctgggaaagccaaggtggacactctggaggtgatacggcatccggaagaaaccaccaacatgaagaggcaaactgtggcttcttacttccggtattctctgatggacctgctctccaaaatggtggttggacagccccactttgtgcgctgcattaaacccaatgatgaccgagaggccctgcagttctctcgagagagggtgctggcccagctccgctccacagggattctggagacagtcagcatccgccgccagggctattcccaccgcatcctttttgaagaatttgtgaaaaggtattattacttggcattcacagcacatcaaacacctcttgctagcaaagagagctgtgtggctatcttggaaaagtccagattagatcactgggtgctgggaaaaacaaaggtttttctcaaatattaccatgttgagcaaytaaatttgctgcttcgagaagtcataggcagagtggttgtgctgcaggcatataccaaggggtggcttggagccaggagatacaaaaaggtcagagagaagagagagaagggagccattgccatccagtcagcctggagaggatatgatgctcggaggaaatttaagaaaataagcaacagaaggaatgagtctgctgctcataatcaagcaggggccacttcaaaccaaagcagtgggccacattcccccgtcgcagcaggtacgaggggaagtgccgaggttcaagactgcagcgagcctggtgaccataaagttctcaggggctctgtacatcgtaggagccattcacaagcagaatccaacaatggccgtacacagacttcaagcaactctcctgctgtcacagagaaaaatgggcattcacaagcccagagttctccaaaagggtgcgatatcttcgcaggacatgcaaacaaggtagctggatatcttgattccaaagtaaatgtgtatcactccttcagactcatccaagttcataggcatgaagcttgtctgcggctgcgtggttggaccatccaaacttgaaactgttagtgatattttgaagtctttgagacaaaagcccagcttgctgaagaactttggttcagtagagagacagggaggtacaggggagagagaatcaaaagcctggaaatttgctgctgagaataaatgttagctgctccctggnngnaaaaa

SEQ ID NO: 160 - DNA, 2925 bp, Homo Sapiens
  CDS (1)...(2925)
atgagaagggcggggatcggcgaggactccaggctggggttgcaggcccagccaggggcggagccttctccgggtcgggcggggacagagcgctcccttggaggcacccagggacctggccagccgtgcagctgcccaggcgctatggcgagtgcggtcagggggtcgaggccgtggccccggctggggctccagctccagttcgcggcgctgctgctcgggacgctgagtccacaggttcatactctcaggccagagaacctcctgctggtgtccaccttggatggaagtctccacgcactaagcaagcagacaggggacctgaagtggactctgagggatgatcccgtcatcgaaggaccaatgtacgtcacagaaatggcctttctctctgacccagcagatggcagcctgtacatcttggggacccaaaaacaacagggattaatgaaactgccattcaccatccctgagctggttcatgcctctccctgccgcagctctgatggggtcttctacacaggccggaagcaggatgcctggtttgtggtggaccctgagtcaggggagacccagatgacactgaccacagagggtccctccaccccccgcctctacattggccgaacacagtatacggtcaccatgcatgacccaagagccccagccctgcgctggaacaccacctaccgccgctactcagcgccccccatggatggctcacctgggaaatacatgagccacctggcgtcctgcgggatgggcctgctgctcactgtggacccaggaagcgggacggtgctgtggacacaggacctgggcgtgcctgtgatgggcgtctacacctggcaccaggacggcctgcgccagctgccgcatctcacgctggctcgagacactctgcatttcctcgccctccgctggggccacatccgactgcctgcctcaggcccccgggacacagccaccctcttctctaccttggacacccagctgctaatgacgctgtatgtggggaaggatgaaactggcttctatgtctytaaagcactggtccacacaggagtggccctggtgcctcgtggactgaccctggcccccgcagatggccccaccacagatgaggtgacactccaagtctcaggagagcgagagggctcacccagcactgctgttagatacccctcaggcagtgtggccctcccaagccagtggctgctcattggacaccacgagctacccccagtcctgcacaccaccatgctgagggtccatcccaccctggggagtggaactgcagagacaagacctccagagaatacccaggccccagccttcttcttggagctattgagcctgagccgagagaaactttgggactccgagctgcatccagaagaaaaaactccagactcttacttggggctgggaccccaagacctgctggcagctagcctcactgctgtcctcctgggagggtggattctctttgtgatgaggcagcaacagccgcaggtggtggagaagcagcaggagacccccctggcacctgcagactttgctcacatctcccaggatgcccagtccctgcactcgggggccagccggaggagccagaagaggcttcagagtccctcaaagcaagcccagccactcgacgaccctgaagctgagcaactcaccgtagtggggaagatttccttcaatcccaaggacgtgctgggccgcggggcaggcgggactttcgttttccggggacagtttgagggacgggcagtggctgtcaagcggctcctccgcgagtgctttggcctggttcggcgggaagttcaactgctgcaggagtctgacaggcaccccaacgtgctccgctacttctgcaccgagcggggaccccagttccactacattgccctggagctctgccgggcctccttgcaggagtacgtagaaaacccggacctggatcgcgggggtctggagcccgaggtcgtgctgcagcagctgatgtctggcctggcccacctgcactctttacacatagtgcaccgggacctgaagccaggaaatattctcatcaccgggcctgacagccagggcctgggcagagtggtgctctcagacttcggcctctgcaagaagctgcctgctggccgctgtagcttcagcctccactccggcatccccggcacggaaggctggatggcgcccgagcttctgcagctcctgccaccagacagtcctaccagcgctgtggacatcttctctgcaggctgcgtgttctactacgtgctttctggtggcagccacccctttggagacagtctttatcgccaggcaaacatcctcacaggggctccctgtctggctcacctggaggaagaggtccacgacaaggtggttgcccgggacctggttggagccatgttgagcccactgccgcagccacgcccctctgccccccaggtgctggcccaccccttcttttggagcagagccaagcaactccagttcttccaggacgtcagtgactggctggagaaggagtccgagcaggagcccctggtgagggcactggaggcgggaggctgcgcagtggtccgggacaactggcacgagcacatctccatgccgctgcagacagatctgagaaagttccggtcctataaggggacatcagtgcgagacctgctccgtgctgtgaggaacaagaagcaccactacagggagctcccagttgaggtgcgacaggcactcggccaagtccctgatggcttcgtccagtacttcacaaaccgcttcccacggctgctcctccacacgcaccgagccatgaggagctgcgcctctgagagcctcttcctgccctactacccgccagactcagaggccaggaggccatgccctggggccacagggaggtga

SEQ ID NO: 161 - protein, 974 aa, Homo Sapiens
  VARIANT 348: Xaa = Any Amino Acid
MRRAGIGEDSRLGLQAQPGAEPSPGRAGTERSLGGTQGPGQPCSCPGAMASAVRGSRPWPRLGLQLQFAALLLGTLSPQVHTLRPENLLLVSTLDGSLHALSKQTGDLKWTLRDDPVIEGPMYVTEMAFLSDPADGSLYILGTQKQQGLMKLPFTIPELVHASPCRSSDGVFYTGRKQDAWFVVDPESGETQMTLTTEGPSTPRLYIGRTQYTVTMHDPRAPALRWNTTYRRYSAPPMDGSPGKYMSHLASCGMGLLLTVDPGSGTVLWTQDLGVPVMGVYTWHQDGLRQLPHLTLARDTLHFLALRWGHIRLPASGPRDTATLFSTLDTQLLMTLYVGKDETGFYVXKALVHTGVALVPRGLTLAPADGPTTDEVTLQVSGEREGSPSTAVRYPSGSVALPSQWLLIGHHELPPVLHTTMLRVHPTLGSGTAETRPPENTQAPAFFLELLSLSREKLWDSELHPEEKTPDSYLGLGPQDLLAASLTAVLLGGWILFVMRQQQPQVVEKQQETPLAPADFAHISQDAQSLHSGASRRSQKRLQSPSKQAQPLDDPEAEQLTVVGKISFNPKDVLGRGAGGTFVFRGQFEGRAVAVKRLLRECFGLVRREVQLLQESDRHPNVLRYFCTERGPQFHYIALELCRASLQEYVENPDLDRGGLEPEVVLQQLMSGLAHLHSLHIVHRDLKPGNILITGPDSQGLGRVVLSDFGLCKKLPAGRCSFSLHSGIPGTEGWMAPELLQLLPPDSPTSAVDIFSAGCVFYYVLSGGSHPFGDSLYRQANILTGAPCLAHLEEEVHDKVVARDLVGAMLSPLPQPRPSAPQVLAHPFFWSRAKQLQFFQDVSDWLEKESEQEPLVRALEAGGCAVVRDNWHEHISMPLQTDLRKFRSYKGTSVRDLLRAVRNKKHHYRELPVEVRQALGQVPDGFVQYFTNRFPRLLLHTHRAMRSCASESLFLPYYPPDSEARRPCPGATGR

SEQ ID NO: 162 - DNA, 2769 bp, Homo Sapiens
  CDS (1)...(2769)
atgagaagggcggggatcggcgaggactccaggctggggttgcaggcccagccaggggcggagccttctccgggtcgggcggggacagagcgctcccttggaggcacccagggacctggccagccgtgcagctgcccaggcgctatggcgagtgcggtcagggggtcgaggccgtggccccggctggggctccagctccagttcgcggcgctgctgctcgggacgctgagtccacaggttcatactctcaggccagagaacctcctgctggtgtccaccttggatggaagtctccacgcactaagcaagcagacaggggacctgaagtggactctgagggatgatcccgtcatcgaaggaccaatgtacgtcacagaaatggcctttctctctgacccagcagatggcagcctgtacatcttggggacccaaaaacaacagggattaatgaaactgccattcaccatccctgagctggttcatgcctctccctgccgcagctctgatggggtcttctacacaggccggaagcaggatgcctggtttgtggtggaccctgagtcaggggagacccagatgacactgaccacagagggtccctccaccccccgcctctacattggccgaacacagtatacggtcaccatgcatgacccaagagccccagccctgcgctggaacaccacctaccgccgctactcagcgccccccatggatggctcacctgggaaatacatgagccacctggcgtcctgcgggatgggcctgctgctcactgtggacccaggaagcgggacggtgctgtggacacaggacctgggcgtgcctgtgatgggcgtctacacctggcaccaggacggcctgcgccagctgccgcatctcacgctggctcgagacactctgcatttcctcgccctccgctggggccacatccgactgcctgcctcaggcccccgggacacagccaccctcttctctaccttggacacccagctgctaatgacgctgtatgtggggaaggatgaaactggcttctatgtctytaaagcactggtccacacaggagtggccctggtgcctcgtggactgaccctggcccccgcagatggccccaccacagatgaggtgacactccaagtctcaggagagcgagagggctcacccagcactgctgttagatacccctcaggcagtgtggccctcccaagccagtggctgctcattggacaccacgagctacccccagtcctgcacaccaccatgctgagggtccatcccaccctggggagtggaactgcagagacaagacctccagagaatacccaggccccagccttcttcttggagcaacagccgcaggtggtggagaagcagcaggagacccccctggcacctgcagactttgctcacatctcccaggatgcccagtccctgcactcgggggccagccggaggagccagaagaggcttcagagtccctcaaagcaagcccagccactcgacgaccctgaagctgagcaactcaccgtagtggggaagatttccttcaatcccaaggacgtgctgggccgcggggcaggcgggactttcgttttccggggacagtttgagggacgggcagtggctgtcaagcggctcctccgcgagtgctttggcctggttcggcgggaagttcaactgctgcaggagtctgacaggcaccccaacgtgctccgctacttctgcaccgagcggggaccccagttccactacattgccctggagctctgccgggcctccttgcaggagtacgtagaaaacccggacctggatcgcgggggtctggagcccgaggtcgtgctgcagcagctgatgtctggcctggcccacctgcactctttacacatagtgcaccgggacctgaagccaggaaatattctcatcaccgggcctgacagccagggcctgggcagagtggtgctctcagacttcggcctctgcaagaagctgcctgctggccgctgtagcttcagcctccactccggcatccccggcacggaaggctggatggcgcccgagcttctgcagctcctgccaccagacagtcctaccagcgctgtggacatcttctctgcaggctgcgtgttctactacgtgctttctggtggcagccacccctttggagacagtctttatcgccaggcaaacatcctcacaggggctccctgtctggctcacctggaggaagaggtccacgacaaggtggttgcccgggacctggttggagccatgttgagcccactgccgcagccacgcccctctgccccccaggtgctggcccaccccttcttttggagcagagccaagcaactccagttcttccaggacgtcagtgactggctggagaaggagtccgagcaggagcccctggtgagggcactggaggcgggaggctgcgcagtggtccgggacaactggcacgagcacatctccatgccgctgcagacagatctgagaaagttccggtcctataaggggacatcagtgcgagacctgctccgtgctgtgaggaacaagaagcaccactacagggagctcccagttgaggtgcgacaggcactcggccaagtccctgatggcttcgtccagtacttcacaaaccgcttcccacggctgctcctccacacgcaccgagccatgaggagctgcgcctctgagagcctcttcctgccctactacccgccagactcagaggccaggaggccatgccctggggccacagggaggtga

SEQ ID NO: 163 - protein, 922 aa, Homo Sapiens
  VARIANT 348: Xaa = Any Amino Acid
MRRAGIGEDSRLGLQAQPGAEPSPGRAGTERSLGGTQGPGQPCSCPGAMASAVRGSRPWPRLGLQLQFAALLLGTLSPQVHTLRPENLLLVSTLDGSLHALSKQTGDLKWTLRDDPVIEGPMYVTEMAFLSDPADGSLYILGTQKQQGLMKLPFTIPELVHASPCRSSDGVFYTGRKQDAWFVVDPESGETQMTLTTEGPSTPRLYIGRTQYTVTMHDPRAPALRWNTTYRRYSAPPMDGSPGKYMSHLASCGMGLLLTVDPGSGTVLWTQDLGVPVMGVYTWHQDGLRQLPHLTLARDTLHFLALRWGHIRLPASGPRDTATLFSTLDTQLLMTLYVGKDETGFYVXKALVHTGVALVPRGLTLAPADGPTTDEVTLQVSGEREGSPSTAVRYPSGSVALPSQWLLIGHHELPPVLHTTMLRVHPTLGSGTAETRPPENTQAPAFFLEQQPQVVEKQQETPLAPADFAHISQDAQSLHSGASRRSQKRLQSPSKQAQPLDDPEAEQLTVVGKISFNPKDVLGRGAGGTFVFRGQFEGRAVAVKRLLRECFGLVRREVQLLQESDRHPNVLRYFCTERGPQFHYIALELCRASLQEYVENPDLDRGGLEPEVVLQQLMSGLAHLHSLHIVHRDLKPGNILITGPDSQGLGRVVLSDFGLCKKLPAGRCSFSLHSGIPGTEGWMAPELLQLLPPDSPTSAVDIFSAGCVFYYVLSGGSHPFGDSLYRQANILTGAPCLAHLEEEVHDKVVARDLVGAMLSPLPQPRPSAPQVLAHPFFWSRAKQLQFFQDVSDWLEKESEQEPLVRALEAGGCAVVRDNWHEHISMPLQTDLRKFRSYKGTSVRDLLRAVRNKKHHYRELPVEVRQALGQVPDGFVQYFTNRFPRLLLHTHRAMRSCASESLFLPYYPPDSEARRPCPGATGR

SEQ ID NO: 164 - DNA, 768 bp, Homo Sapiens
  CDS (1)...(768)
atgagaagggcggggatcggcgaggactccaggctggggttgcaggcccagccaggggcggagccttctccgggtcgggcggggacagagcgctcccttggaggcacccagggacctggccagccgtgcagctgcccaggcgctatggcgagtgcggtcagggggtcgaggccgtggccccggctggggctccagctccagttcgcggcgctgctgctcgggacgctgagtccacaggttcatactctcaggccagagaacctcctgctggtgtccaccttggatggaagtctccacgcactaagcaagcagacaggggacctgaagtggactctgagggatgatcccgtcatcgaaggaccaatgtacgtcacagaaatggcctttctctctgacccagcagatggcagcctgtacatcttggggacccaaaaacaacagggattaatgaaactgccattcaccatccctgagctggttcatgcctctccctgccgcagctctgatggggtcttctacacaggccggaagcaggatgcctggtttgtggtggaccctgagtcaggggagacccagatgacactgaccacagagggtccctccaccccccgcctctacattggccgaacacagtatacggtcaccatgcatgacccaagagccccagccctgcgctggaacaccacctaccgccgctactcagcgccccccatggatggctcacctgggaaatataaccctccatgtgatctccacacaccagactga

SEQ ID NO: 165 - protein, 255 aa, Homo Sapiens
MRRAGIGEDSRLGLQAQPGAEPSPGRAGTERSLGGTQGPGQPCSCPGAMASAVRGSRPWPRLGLQLQFAALLLGTLSPQVHTLRPENLLLVSTLDGSLHALSKQTGDLKWTLRDDPVIEGPMYVTEMAFLSDPADGSLYILGTQKQQGLMKLPFTIPELVHASPCRSSDGVFYTGRKQDAWFVVDPESGETQMTLTTEGPSTPRLYIGRTQYTVTMHDPRAPALRWNTTYRRYSAPPMDGSPGKYNPPCDLHTPD

SEQ ID NO: 166 - DNA, 2052 bp, Homo Sapiens
  CDS (1)...(2052)
atggataagtacgatgtgattaaggccatcgggcaaggtgccttcgggaaagcatacttagctaaagggaaatcagatagcaagcactgtgtcataaaagagatcaattttgaaaagatgcccatacaagaaaaagaagcttcaaagaaagaagtgattcttctggaaaagatgaaacatcccaacattgtagccttcttcaattcatttcaagagaatggcaggctgtttattgtaatggaatattgtgatggaggggatctcatgaaaaggatcaatagacaacggggtgtgttatttagtgaagatcagatcctcggttggtttgtacagatttctctaggactaaaacatattcatgacaggaagatattacacagggacataaaagctcagaacatttttcttagcaagaacggaatggtggcaaagcttggggactttggtatagcaagagtcctgaataattccatggaacttgctcgaacttgtattggaacaccttactacctgtccccagagatctgtcagaataaaccctacaacaataaaacggatatttggtctcttggctgtgtcttatatgagctctgcacacttaaacatccttttgagggtaacaacttacagcagctggttctgaagatttgtcaagcacattttgccccaatatctccggggttttctcgtgagctccattccttgatatctcagctctttcaagtatctcctcgagaccgaccatccataaattccattttgaaaaggccctttttagagaatcttattcccaaatatttgactcctgaggtcattcaggaagaattcagtcacatgcttatatgcagagcaggagcgccagcttctcgacatgctgggaaggtggtccagaagtgtaaaatacaaaaagtgagattccagggaaagtgcccaccaagatcaaggatatctgtgccaattaaaaggaatgctatattgcatagaaatgaatggagaccaccagctggagcccagaaggccagatctataaaaatgatagaaagacccaaaattgctgctgtctgtggacattatgattattattatgctcaacttgatatgctgaggaggagagcccacaaaccaagttatcaccctattcctcaagaaaatactggagttgaggattacggtcaggaaacgaggcatggtccatccccaagtcaatggcctgctgagtaccttcagagaaaatttgaagctcaacaatataagttgaaagtggagaagcaattgggtcttcgtccatcttctgccgagccaaattacaaccagagacaagagctaagaagtaatggagaagagcctagattccaggagctgccatttaggaaaaacgaaatgaaggaacaggaatattggaagcagttagaggaaatacgccaacagtaccacaatgacatgaaagaaattagaaagaagatggggagagaaccagaggagaactcaaaaataagtcataaaacctatttggtgaagaagagtaacctgcctgtccatcaagatgcatctgagggagaagcacctgtgcaggacattgaaaaagacttgaaacaaatgaggcttcagaacacaaaggaaagtaaaaatccagaacagaaatataaagctaagaagggggtaaaatttgaaattaatttagacaaatgtatttctgatgaaaacatcctccaagaggaagaggcaatggatataccaaatgaaactttgacctttgaggatggcatgaagtttaaggaatatgaatgtgtaaaggagcatggagattatacagacaaagcatttgaaaaacttcactgcccagaagcagggttttccacgcagactgtagctgctgtgggaaacaggaggcagtgggatggaggagcgcctcagactctgctgcagatgatggcagtggccgacatcacctccacctgccccacggggcctgacagtgagtctgtgcttagcgtcagtcgtcaggaagggaagaccaaggacccgtacagcccagtgctcatcctgatgtga

SEQ ID NO: 167 - protein, 683 aa, Homo Sapiens
MDKYDVIKAIGQGAFGKAYLAKGKSDSKHCVIKEINFEKMPIQEKEASKKEVILLEKMKHPNIVAFFNSFQENGRLFIVMEYCDGGDLMKRINRQRGVLFSEDQILGWFVQISLGLKHIHDRKILHRDIKAQNIFLSKNGMVAKLGDFGIARVLNNSMELARTCIGTPYYLSPEICQNKPYNNKTDIWSLGCVLYELCTLKHPFEGNNLQQLVLKICQAHFAPISPGFSRELHSLISQLFQVSPRDRPSINSILKRPFLENLIPKYLTPEVIQEEFSHMLICRAGAPASRHAGKVVQKCKIQKVRFQGKCPPRSRISVPIKRNAILHRNEWRPPAGAQKARSIKMIERPKIAAVCGHYDYYYAQLDMLRRRAHKPSYHPIPQENTGVEDYGQETRHGPSPSQWPAEYLQRKFEAQQYKLKVEKQLGLRPSSAEPNYNQRQELRSNGEEPRFQELPFRKNEMKEQEYWKQLEEIRQQYHNDMKEIRKKMGREPEENSKISHKTYLVKKSNLPVHQDASEGEAPVQDIEKDLKQMRLQNTKESKNPEQKYKAKKGVKFEINLDKCISDENILQEEEAMDIPNETLTFEDGMKFKEYECVKEHGDYTDKAFEKLHCPEAGFSTQTVAAVGNRRQWDGGAPQTLLQMMAVADITSTCPTGPDSESVLSVSRQEGKTKDPYSPVLILM

SEQ ID NO: 168 - DNA, 1965 bp, Homo Sapiens
  CDS (1)...(1965)
atggataagtacgatgtgattaaggccatcgggcaaggtgccttcgggaaagcatacttagctaaagggaaatcagatagcaagcactgtgtcataaaagagatcaattttgaaaagatgcccatacaagaaaaagaagcttcaaagaaagaagtgattcttctggaaaagatgaaacatcccaacattgtagccttcttcaattcatttcaagagaatggcaggctgtttattgtaatggaatattgtgatggaggggatctcatgaaaaggatcaatagacaacggggtgtgttatttagtgaagatcagatcctcggttggtttgtacagatttctctaggactaaaacatattcatgacaggaagatattacacagggacataaaagctcagaacatttttcttagcaagaacggaatggtggcaaagcttggggactttggtatagcaagagtcctgaataattccatggaacttgctcgaacttgtattggaacaccttactacctgtccccagagatctgtcagaataaaccctacaacaataaaacggatatttggtctcttggctgtgtcttatatgagctctgcacacttaaacatccttttgagggtaacaacttacagcagctggttctgaagatttgtcaagcacattttgccccaatatctccggggttttctcgtgagctccattccttgatatctcagctctttcaagtatctcctcgagaccgaccatccataaattccattttgaaaaggccctttttagagaatcttattcccaaatatttgactcctgaggtcattcaggaagaattcagtcacatgcttatatgcagagcaggagcgccagcttctcgacatgctgggaaggtggtccagaagtgtaaaatacaaaaagtgagattccagggaaagtgcccaccaagatcaaggatatctgtgccaattaaaaggaatgctatattgcatagaaatgaatggagaccaccagctggagcccagaaggccagatctataaaaatgatagaaagacccaaaattgctgctgtctgtggacattatgattattattatgctcaacttgatatgctgaggaggagagcccacaaaccaagttatcaccctattcctcaagaaaatactggagttgaggattacggtcaggaaacgaggcatggtccatccccaagtcaatggcctgctgagtaccttcagagaaaatttgaagctcaacaatataagttgaaagtggagaagcaattgggtcttcgtccatcttctgccgagccaaattacaaccagagacaagagctaagaagtaatggagaagagcctagattccaggagctgccatttaggaaaaacgaaatgaaggaacaggagaactcaaaaataagtcataaaacctatttggtgaagaagagtaacctgcctgtccatcaagatgcatctgagggagaagcacctgtgcaggacattgaaaaagacttgaaacaaatgaggcttcagaacacaaaggaaagtaaaaatccagaacagaaatataaagctaagaagggggtaaaatttgaaattaatttagacaaatgtatttctgatgaaaacatcctccaagaggaagaggcaatggatataccaaatgaaactttgacctttgaggatggcatgaagtttaaggaatatgaatgtgtaaaggagcatggagattatacagacaaagcatttgaaaaacttcactgcccagaagcagggttttccacgcagactgtagctgctgtgggaaacaggaggcagtgggatggaggagcgcctcagactctgctgcagatgatggcagtggccgacatcacctccacctgccccacggggcctgacagtgagtctgtgcttagcgtcagtcgtcaggaagggaagaccaaggacccgtacagcccagtgctcatcctgatgtga

SEQ ID NO: 169 - protein, 654 aa, Homo Sapiens
MDKYDVIKAIGQGAFGKAYLAKGKSDSKHCVIKEINFEKMPIQEKEASKKEVILLEKMKHPNIVAFFNSFQENGRLFIVMEYCDGGDLMKRINRQRGVLFSEDQILGWFVQISLGLKHIHDRKILHRDIKAQNIFLSKNGMVAKLGDFGIARVLNNSMELARTCIGTPYYLSPEICQNKPYNNKTDIWSLGCVLYELCTLKHPFEGNNLQQLVLKICQAHFAPISPGFSRELHSLISQLFQVSPRDRPSINSILKRPFLENLIPKYLTPEVIQEEFSHMLICRAGAPASRHAGKVVQKCKIQKVRFQGKCPPRSRISVPIKRNAILHRNEWRPPAGAQKARSIKMIERPKIAAVCGHYDYYYAQLDMLRRRAHKPSYHPIPQENTGVEDYGQETRHGPSPSQWPAEYLQRKFEAQQYKLKVEKQLGLRPSSAEPNYNQRQELRSNGEEPRFQELPFRKNEMKEQENSKISHKTYLVKKSNLPVHQDASEGEAPVQDIEKDLKQMRLQNTKESKNPEQKYKAKKGVKFEINLDKCISDENILQEEEAMDIPNETLTFEDGMKFKEYECVKEHGDYTDKAFEKLHCPEAGFSTQTVAAVGNRRQWDGGAPQTLLQMMAVADITSTCPTGPDSESVLSVSRQEGKTKDPYSPVLILM

SEQ ID NO: 170 - DNA, 2240 bp, Homo Sapiens
ctgtctcatttcagttatctgtggccacaaggaaagttatttgtctctgtcttggcaaggctgggaggaaagttttagctaagaacctcagcccattggagaccatggataagtacgatgtgattaaggccatcgggcaaggtgccttcgggaaagcatacttagctaaagggaaatcagatagcaagcactgtgtcataaaagagatcaattttgaaaagatgcccatacaagaaaaagaagcttcaaagaaagaagtgattcttctggaaaagatgaaacatcccaacattgtagccttcttcaattcatttcaagagaatggcaggctgtttattgtaatggaatattgtgatggaggggatctcatgaaaaggatcaatagacaacggggtgtgttatttagtgaagatcagatcctcggttggtttgtacagatttctctaggactaaaacatattcatgacaggaagatattacacagggacataaaagctcagaacatttttcttagcaagaacggaatggtggcaaagcttggggactttggtatagcaagagtcctgaataattccatggaacttgctcgaacttgtattggaacaccttactacctgtccccagagatctgtcagaataaaccctacaacaataaaacggatatttggtctcttggctgtgtcttatatgagctctgcacacttaaacatccttttgagggtaacaacttacagcagctggttctgaagatttgtcaagcacattttgccccaatatctccggggttttctcgtgagctccattccttgatatctcagctctttcaagtatctcctcgagaccgaccatccataaattccattttgaaaaggccctttttagagaatcttattcccaaatatttgactcctgaggtcattcaggaagaattcagtcacatgcttatatgcagagcaggagcgccagcttctcgacatgctgggaaggtggtccagaagtgtaaaatacaaaaagtgagattccagggaaagtgcccaccaagatcaaggatatctgtgccaattaaaaggaatgctatattgcatagaaatgaatggagaccaccagctggagcccagaaggccagatctataaaaatgatagaaagacccaaaattgctgctgtctgtggacattatgattattattatgctcaacttgatatgctgaggaggagagcccacaaaccaagttatcaccctattcctcaagaaaatactggagttgaggattacggtcaggaaacgaggcatggtccatccccaagtcaatggcctgctgagtaccttcagagaaaatttgaagctcaacaatataagttgaaagtggagaagcaattgggtcttcgtccatcttctgccgagccaaattacaaccagagacaagagctaagaagtaatggagaagagcctagattccaggagctgccatttaggaaaaacgaaatgaaggaacaggaatattggaagcagttagaggaaatacgccaacagtaccacaatgacatgaaagaaattagaaagaagatggggagagaaccagaggagaactcaaaaataagtcataaaacctatttggtgaagaagagtaacctgcctgtccatcaagatgcatctgagggagaagcacctgtgcaggacattgaaaaagacttgaaacaaatgaggcttcagaacacaaaggaaagtaaaaatccagaacagaaatataaagctaagaagggggtaaaatttgaaattaatttagacaaatgtatttctgatgaaaacatcctccaagaggaagaggcaatggatataccaaatgaaactttgacctttgaggatggcatgaagtttaaggaatatgaatgtgtaaaggagcatggagattatacagacaaagcatttgaaaaacttcactgcccagaagcagggttttccacgcagactgtagctgctgtgggaaacaggaggcagtgggatggaggagcgcctcagactctgctgcagatgatggcagtggccgacatcacctccacctgccccacggggcctgacagtgagtctgtgcttagcgtcagtcgtcaggaagggaagaccaaggacccgtacagcccagtgctcatcctgatgtgatagtctacttctcactatacaccctatagatcttgtatcagacactttcaaatatgttgttttgatatctccctataccaaaaa

SEQ ID NO: 171 - DNA, 1167 bp, Homo Sapiens
  CDS (1)...(1167)
atgttaaaagtgaagaggctggaagaattcaacacgtgttataacagcaaccagctggagaaaatggccttttttcagtgcagggaagaggtggagaaagtgaagtgttttctggaaaaaaattctggggaccaggattcaagatctggacataatgaggcgaaggaggtgtggtcaaacgccgacctgacggaaaggatgcccgtcaaaagcaaaaggacatcagccctcgcagttgacatcccggctcctccggccccatttgatcatcgtattgtgacagccaagcaaggagcggtcaacagcttctatactgtgagcaagacagaaatcctaggaggagggcgtttcggccaggttcacaagtgtgaggagacggccacaggtctgaagctggcagccaaaatcatcaagaccagaggcatgaaggacaaggaggaggtgaagaacgagatcagcgtcatgaaccagctggaccacgcgaacctcatccagctgtacgatgccttcgagtctaagaacgacattgtcctggtcatggagtatgtggatggtggggagctgtttgaccgcatcatcgatgagagctacaatttgacggagcttgataccatcctgttcatgaagcagatatgtgaggggataaggcacatgcatcagatgtacattctccacttggacctgaagcctgagaatatcctgtgtgtgaatcgggatgctaagcaaataaaaattattgattttggattggccagaagatacaaacccagagagaagctgaaggtgaactttggaaccccagaatttctcgcccctgaagttgtgaactatgattttgtttcatttcccactgacatgtggagtgtgggggtcatcgcctatatgctacttagcggtttgtcgcctttcctgggtgacaatgatgctgagacgctgaacaacatcctggcctgcaggtgggacttagaggatgaagaatttcaggacatctcggaggaggccaaggagttcatctctaagcttctgattaaggagaagagttggcgaataagtgcaagcgaagctctcaagcacccctggttgtcagaccacaagctccactccagactcaatgcccagaagaagaagaatcgtggctctgatgcccaggactttgtgaccaaatag

SEQ ID NO: 172 - protein, 388 aa, Homo Sapiens
MLKVKRLEEFNTCYNSNQLEKMAFFQCREEVEKVKCFLEKNSGDQDSRSGHNEAKEVWSNADLTERMPVKSKRTSALAVDIPAPPAPFDHRIVTAKQGAVNSFYTVSKTEILGGGRFGQVHKCEETATGLKLAAKIIKTRGMKDKEEVKNEISVMNQLDHANLIQLYDAFESKNDIVLVMEYVDGGELFDRIIDESYNLTELDTILFMKQICEGIRHMHQMYILHLDLKPENILCVNRDAKQIKIIDFGLARRYKPREKLKVNFGTPEFLAPEVVNYDFVSFPTDMWSVGVIAYMLLSGLSPFLGDNDAETLNNILACRWDLEDEEFQDISEEAKEFISKLLIKEKSWRISASEALKHPWLSDHKLHSRLNAQKKKNRGSDAQDFVTK

SEQ ID NO: 173 - DNA, 1197 bp, Homo Sapiens
  CDS (1)...(1197)
atgttaaaagtgaagaggctggaagaattcaacacgtgttataacagcaaccagctggagaaaatggccttttttcagtgcagggaagaggtggagaaagtgaagtgttttctggaaaaaaattctggggaccaggattcaagatctggacataatgaggcgaaggaggtgtggtcaaacgccgacctgacggaaaggatgcccgtcaaaagcaaaaggacatcagccctcgcagttgacatcccggctcctccggccccatttgatcatcgtattgtgacagccaagcaaggagcggtcaacagcttctatactgtgagcaagacagaaatcctaggaggagggcgtttcggccaggttcacaagtgtgaggagacggccacaggtctgaagctggcagccaaaatcatcaagaccagaggcatgaaggacaaggaggaggtgaagaacgagatcagcgtcatgaaccagctggaccacgcgaacctcatccagctgtacgatgccttcgagtctaagaacgacattgtcctggtcatggagtatgtggatggtggggagctgtttgaccgcatcatcgatgagagctacaatttgacggagcttgataccatcctgttcatgaagcagatatgtgaggggataaggcacatgcatcagatgtacattctccacttggacctgaagcctgagaatatcctgtgtgtgaatcgggatgctaagcaaataaaaattattgattttggattggccagaagatacaaacccagagagaagctgaaggtgaactttggaaccccagaatttctcgcccctgaagttgtgaactatgattttgtttcatttcccactgacatgtggagtgtgggggtcatcgcctatatgctacttagcggtttgtcgcctttcctgggtgacaatgatgctgagacgctgaacaacatcctggcctgcaggtgggacttagaggatgaagaatttcaggacatctcggaggaggccaaggagttcatctctaagcttctgattaaggagaagagttggcgaataagtgcaagcgaagctctcaagcacccctggttgtcagaccacaagctccactccagactcaatgcccaggtgaccacggcttcttgctcttcctctttttctcctgtctgcctgtcttttgaagatcagatgctggagtcatcttaa

SEQ ID NO: 174 - protein, 398 aa, Homo Sapiens
MLKVKRLEEFNTCYNSNQLEKMAFFQCREEVEKVKCFLEKNSGDQDSRSGHNEAKEVWSNADLTERMPVKSKRTSALAVDIPAPPAPFDHRIVTAKQGAVNSFYTVSKTEILGGGRFGQVHKCEETATGLKLAAKIIKTRGMKDKEEVKNEISVMNQLDHANLIQLYDAFESKNDIVLVMEYVDGGELFDRIIDESYNLTELDTILFMKQICEGIRHMHQMYILHLDLKPENILCVNRDAKQIKIIDFGLARRYKPREKLKVNFGTPEFLAPEVVNYDFVSFPTDMWSVGVIAYMLLSGLSPFLGDNDAETLNNILACRWDLEDEEFQDISEEAKEFISKLLIKEKSWRISASEALKHPWLSDHKLHSRLNAQVTTASCSSSFSPVCLSFEDQMLESS

SEQ ID NO: 175 - DNA, 1744 bp, Homo Sapiens
ctctcgtagtggacacttgtcttttcagaagatttatacgactgagagtcaaaacttttaccagagactttcatagtcagtttgaattctgcaaaatttctctttatcttctggaatgtatgctctagacttggagtggctcaagctcttcgatgtgatcctatcaatgtcaagagaaagaagcactgaagagtcataattgtgtcctgatttataaatcggagacagagggagacgaaaaccacactccagaaagtagcttaatcggactcactactaagatgttaaaagtgaagaggctggaagaattcaacacgtgttataacagcaaccagctggagaaaatggccttttttcagtgcagggaagaggtggagaaagtgaagtgttttctggaaaaaaattctggggaccaggattcaagatctggacataatgaggcgaaggaggtgtggtcaaacgccgacctgacggaaaggatgcccgtcaaaagcaaaaggacatcagccctcgcagttgacatcccggctcctccggccccatttgatcatcgtattgtgacagccaagcaaggagcggtcaacagcttctatactgtgagcaagacagaaatcctaggaggagggcgtttcggccaggttcacaagtgtgaggagacggccacaggtctgaagctggcagccaaaatcatcaagaccagaggcatgaaggacaaggaggaggtgaagaacgagatcagcgtcatgaaccagctggaccacgcgaacctcatccagctgtacgatgccttcgagtctaagaacgacattgtcctggtcatggagtatgtggatggtggggagctgtttgaccgcatcatcgatgagagctacaatttgacggagcttgataccatcctgttcatgaagcagatatgtgaggggataaggcacatgcatcagatgtacattctccacttggacctgaagcctgagaatatcctgtgtgtgaatcgggatgctaagcaaataaaaattattgattttggattggccagaagatacaaacccagagagaagctgaaggtgaactttggaaccccagaatttctcgcccctgaagttgtgaactatgattttgtttcatttcccactgacatgtggagtgtgggggtcatcgcctatatgctacttagcggtttgtcgcctttcctgggtgacaatgatgctgagacgctgaacaacatcctggcctgcaggtgggacttagaggatgaagaatttcaggacatctcggaggaggccaaggagttcatctctaagcttctgattaaggagaagagttggcgaataagtgcaagcgaagctctcaagcacccctggttgtcagaccacaagctccactccagactcaatgcccagaagaagaagaatcgtggctctgatgcccaggactttgtgaccaaatagtctacaggaggcagccatttggaaggaaaactgctgtggttgctgctgcttcgagaaaattttttgaaaaatcagcagttctgatgccttgacccctgtgatgacctggtagtcttagcagggggagccctcgaccctgaatgtgaacttgaactggagtgcctctgctgcgctcagaggaacacccagcgctgcggtctggtctcagggcgcaaacacatccctgcacccggtggtggtgatgttgggaagatgtttccctgccatctttgagattttttacttttttaaaaaaa

SEQ ID NO: 176 - DNA, 2301 bp, Homo Sapiens
  CDS (1)...(2301)
atggccagcaccaggagtatcgagctggagcactttgaggaacgggacaaaaggccgcggccggggtcgcggagaggggcccccagctcctccgggggcagcagcagctcgggccccaaggggaacgggctcatccccagtccggcgcacagtgcccactgcagcttctaccgcacgcggaccctgcaggccctcagctcggagaagaaggccaagaaggcgcgcttctaccggaacggggaccgctacttcaagggcctggtgtttgccatctccagcgaccgcttccggtcyttcgatgcgctcctcatagagctcacccgctccctgtcggacaacgtgaacctgccccagggtgtccgcactatctacaccatcgacggcagccggaaggtcaccagcctggacgagctgctggaaggtgagagttacgtgtgtgcatccaatgaaccatttcgtaaagtcgattacaccaaaaatattaatccaaactggtctgtgaacatcaagggtgggacatcccgagcgctggctgctgcctcctctgtgaaaagtgaagtaaaagaaagtaaagatttcatcaaacccaagttagtgactgtgattcgaagtggagtgaagcctagaaaagccgtgcggatccttctgaataaaaagactgctcattcctttgaacaagtcttaacagatatcaccgaagccattaaactagactcaggagtcgtcaagaggctctgcaccctggatggaaagcaggttacttgtctgcaagacttttttggtgatgacgatgtttttattgcatgtggaccagaaaaatttcgttatgcccaagatgactttgtcctggatcatagtgaatgtcgtgtcctgaagtcatcttattctcgatcctcagctgttaagtattctggatccaaaagccctgggccctctcgacgcagcaaatcaccagcttcagttaatggaactcccagcagccaactttctactcctaaatctacgaaatcctccagttcctctccaactagtccaggaagtttcagaggattaaagcagatttctgctcatggcagatcttcttccaatgtaaacggtggacctgagcttgaccgttgcataagtcctgaaggtgtgaatggaaacagatgctctgaatcatcaactcttcttgagaaatacaaaattggaaaggtcattggtgatggcaattttgcagtagtcaaagagtgtatagacaggtccactggaaaggagtttgccctaaagattatagacaaagccaaatgttgtggaaaggaacacctgattgagaatgaagtgtcaatactgcgccgagtgaaacatcccaatatcattatgctggtcgaggagatggaaacagcaactgagctctttctggtgatggaattggtcaaaggtggagatctctttgatgcaattacttcgtcgaccaagtacactgagagagatggcagtgccatggtgtacaacttagccaatgccctcaggtatctccatggcctcagcatcgtgcacagagacatcaaaccagagaatctcttggtgtgtgaatatcctgatggaaccaagtctttgaaactgggagactttgggcttgcgactgtggtagaaggccctttatacacagtctgtggcacacccacttatgtggctccagaaatcattgctgaaactggctatggcctgaaggtggacatttgggcagctggtgtgatcacatacatacttctctgtggattcccaccattccgaagtgagaacaatctccaggaagatctcttcgaccagatcttggctgggaagctggagtttccggccccctactgggataacatcacggactctgccaaggaattaatcagtcaaatgcttcaggtaaatgttgaagctcggtgtaccgcgggacaaatcctgagtcacccctgggtgtcagatgatgcctcccaggagaataacatgcaagctgaggtgacaggtaaactaaaacagcactttaataatgcgctccccaaacagaacagcactaccaccggggtctccgtcatcatgaacacggctctagataaggaggggcagattttctgcagcaagcactgtcaagacagcggcaggcctgggatggagcccatctctccagttcctccctcagtggaggagatccctgtgcctggggaagcagtcccggcccccacccctccggaatctcccaccccccactgtcctcccgctgccccgggtggtgagcgggcaggaacctggcgccgccaccgagactga

SEQ ID NO: 177 - protein, 766 aa, Homo Sapiens
  VARIANT 98: Xaa = Any Amino Acid
MASTRSIELEHFEERDKRPRPGSRRGAPSSSGGSSSSGPKGNGLIPSPAHSAHCSFYRTRTLQALSSEKKAKKARFYRNGDRYFKGLVFAISSDRFRXFDALLIELTRSLSDNVNLPQGVRTIYTIDGSRKVTSLDELLEGESYVCASNEPFRKVDYTKNINPNWSVNIKGGTSRALAAASSVKSEVKESKDFIKPKLVTVIRSGVKPRKAVRILLNKKTAHSFEQVLTDITEAIKLDSGVVKRLCTLDGKQVTCLQDFFGDDDVFIACGPEKFRYAQDDFVLDHSECRVLKSSYSRSSAVKYSGSKSPGPSRRSKSPASVNGTPSSQLSTPKSTKSSSSSPTSPGSFRGLKQISAHGRSSSNVNGGPELDRCISPEGVNGNRCSESSTLLEKYKIGKVIGDGNFAVVKECIDRSTGKEFALKIIDKAKCCGKEHLIENEVSILRRVKHPNIIMLVEEMETATELFLVMELVKGGDLFDAITSSTKYTERDGSAMVYNLANALRYLHGLSIVHRDIKPENLLVCEYPDGTKSLKLGDFGLATVVEGPLYTVCGTPTYVAPEIIAETGYGLKVDIWAAGVITYILLCGFPPFRSENNLQEDLFDQILAGKLEFPAPYWDNITDSAKELISQMLQVNVEARCTAGQILSHPWVSDDASQENNMQAEVTGKLKQHFNNALPKQNSTTTGVSVIMNTALDKEGQIFCSKHCQDSGRPGMEPISPVPPSVEEIPVPGEAVPAPTPPESPTPHCPPAAPGGERAGTWRRHRD

SEQ ID NO: 178 - DNA, 2298 bp, Homo Sapiens
  CDS (1)...(2298)
atggccagcaccaggagtatcgagctggagcactttgaggaacgggacaaaaggccgcggccggggtcgcggagaggggcccccagctcctccgggggcagcagcagctcgggccccaaggggaacgggctcatccccagtccggcgcacagtgcccactgcagcttctaccgcacgcggaccctgcaggccctcagctcggagaagaaggccaagaaggcgcgcttctaccggaacggggaccgctacttcaagggcctggtgtttgccatctccagcgaccgcttccggtcyttcgatgcgctcctcatagagctcacccgctccctgtcggacaacgtgaacctgccccagggtgtccgcactatctacaccatcgacggcagccggaaggtcaccagcctggacgagctgctggaaggtgagagttacgtgtgtgcatccaatgaaccatttcgtaaagtcgattacaccaaaaatattaatccaaactggtctgtgaacatcaagggtgggacatcccgagcgctggctgctgcctcctctgtgaaaagtgaagtaaaagaaagtaaagatttcatcaaacccaagttagtgactgtgattcgaagtggagtgaagcctagaaaagccgtgcggatccttctgaataaaaagactgctcattcctttgaacaagtcttaacagatatcaccgaagccattaaactagactcaggagtcgtcaagaggctctgcaccctggatggaaagcaggttacttgtctgcaagacttttttggtgatgacgatgtttttattgcatgtggaccagaaaaatttcgttatgcccaagatgactttgtcctggatcatagtgaatgtcgtgtcctgaagtcatcttattctcgatcctcagctgttaagtattctggatccaaaagccctgggccctctcgacgcagcaaatcaccagcttcagttaatggaactcccagcagccaactttctactcctaaatctacgaaatcctccagttcctctccaactagtccaggaagtttcagaggattaaagatttctgctcatggcagatcttcttccaatgtaaacggtggacctgagcttgaccgttgcataagtcctgaaggtgtgaatggaaacagatgctctgaatcatcaactcttcttgagaaatacaaaattggaaaggtcattggtgatggcaattttgcagtagtcaaagagtgtatagacaggtccactggaaaggagtttgccctaaagattatagacaaagccaaatgttgtggaaaggaacacctgattgagaatgaagtgtcaatactgcgccgagtgaaacatcccaatatcattatgctggtcgaggagatggaaacagcaactgagctctttctggtgatggaattggtcaaaggtggagatctctttgatgcaattacttcgtcgaccaagtacactgagagagatggcagtgccatggtgtacaacttagccaatgccctcaggtatctccatggcctcagcatcgtgcacagagacatcaaaccagagaatctcttggtgtgtgaatatcctgatggaaccaagtctttgaaactgggagactttgggcttgcgactgtggtagaaggccctttatacacagtctgtggcacacccacttatgtggctccagaaatcattgctgaaactggctatggcctgaaggtggacatttgggcagctggtgtgatcacatacatacttctctgtggattcccaccattccgaagtgagaacaatctccaggaagatctcttcgaccagatcttggctgggaagctggagtttccggccccctactgggataacatcacggactctgccaaggaattaatcagtcaaatgcttcaggtaaatgttgaagctcggtgtaccgcgggacaaatcctgagtcacccctgggtgtcagatgatgcctcccaggagaataacatgcaagctgaggtgacaggtaaactaaaacagcactttaataatgcgctccccaaacagaacagcactaccaccggggtctccgtcatcatgaacacggctctagataaggaggggcagattttctgcagcaagcactgtcaagacagcggcaggcctgggatggagcccatctctccagttcctccctcagtggaggagatccctgtgcctggggaagcagtcccggcccccacccctccggaatctcccaccccccactgtcctcccgctgccccgggtggtgagcgggcaggaacctggcgccgccaccgagactga

SEQ ID NO: 179 - protein, 765 aa, Homo Sapiens
  VARIANT 98: Xaa = Any Amino Acid
MASTRSIELEHFEERDKRPRPGSRRGAPSSSGGSSSSGPKGNGLIPSPAHSAHCSFYRTRTLQALSSEKKAKKARFYRNGDRYFKGLVFAISSDRFRXFDALLIELTRSLSDNVNLPQGVRTIYTIDGSRKVTSLDELLEGESYVCASNEPFRKVDYTKNINPNWSVNIKGGTSRALAAASSVKSEVKESKDFIKPKLVTVIRSGVKPRKAVRILLNKKTAHSFEQVLTDITEAIKLDSGVVKRLCTLDGKQVTCLQDFFGDDDVFIACGPEKFRYAQDDFVLDHSECRVLKSSYSRSSAVKYSGSKSPGPSRRSKSPASVNGTPSSQLSTPKSTKSSSSSPTSPGSFRGLKISAHGRSSSNVNGGPELDRCISPEGVNGNRCSESSTLLEKYKIGKVIGDGNFAVVKECIDRSTGKEFALKIIDKAKCCGKEHLIENEVSILRRVKHPNIIMLVEEMETATELFLVMELVKGGDLFDAITSSTKYTERDGSAMVYNLANALRYLHGLSIVHRDIKPENLLVCEYPDGTKSLKLGDFGLATVVEGPLYTVCGTPTYVAPEIIAETGYGLKVDIWAAGVITYILLCGFPPFRSENNLQEDLFDQILAGKLEFPAPYWDNITDSAKELISQMLQVNVEARCTAGQILSHPWVSDDASQENNMQAEVTGKLKQHFNNALPKQNSTTTGVSVIMNTALDKEGQIFCSKHCQDSGRPGMEPISPVPPSVEEIPVPGEAVPAPTPPESPTPHCPPAAPGGERAGTWRRHRD

SEQ ID NO: 180 - DNA, 2829 bp, Homo Sapiens
  CDS (1)...(2829)
atgcaattcccctcgcctccagccgcgaggagctccccggcgccgcaggcagcgtcctcctccgaagcagctgcacctgcaactgggcagcctggaccctcgtgccctgttcccgggacctcgcgcagggggcgccccgggacaccccctgcgggccgggtggaggaggaagaggaggaggaggaagaagacgtggacaaggacccccatcctacccagaacacctgcctgcgctgccgccacttctctttaagggagaggaaaagagagcctaggagaaccatggggggctgcgaagtccgggaatttcttttgcaatttggtttcttcttgcctctgctgacagcgtggccaggcgactgcagtcacgtctccaacaaccaagttgtgttgcttgatacaacaactgtactgggagagctaggatggaaaacatatccattaaatgggtgggatgccatcactgaaatggatgaacataataggcccattcacacataccaggtatgtaatgtaatggaaccaaaccaaaacaactggcttcgtacaaactggatctcccgtgatgcagctcagaaaatttatgtggaaatgaaattcacactaagggattgtaacagcatcccatgggtcttggggacttgcaaagaaacatttaatctgttttatatggaatcagatgagtcccacggaattaaattcaagccaaaccagtatacaaagatcgacacaattgctgctgatgagagttttacccagatggatttgggtgatcgcatcctcaaactcaacactgaaattcgtgaggtggggcctatagaaaggaaaggattttatctggcttttcaagacattggggcgtgcattgccctggtttcagtccgtgttttctacaagaaatgccccttcactgttcgtaacttggccatgtttcctgataccattccaagggttgattcctcctctttggttgaagcacggggttcttgtgtgaagagtgctgaagagcgtgacactcctaaactgtattgtggagctgatggagattggctggttcctcttggaaggtgcatctgcagtacaggatatgaagaaattgagggttcttgccatgcttgcagaccaggattctataaagcttttgctgggaacacaaaatgttctaaatgtcctccacacagtttaacatacatggaagcaacttctgtctgtcagtgtgaaaagggttatttccgagctgaaaaagacccaccttctatggcatgtaccaggccaccttcagctcctaggaatgtggtttttaacatcaatgaaacagcccttattttggaatggagcccaccaagtgacacaggagggagaaaagatctcacatacagtgtaatctgtaagaaatgtggcttagacaccagccagtgtgaggactgtggtggaggactccgcttcatcccaagacatacaggcctgatcaacaattccgtgatagtacttgactttgtgtctcacgtgaattacacctttgaaatagaagcaatgaatggagtttctgagttgagtttttctcccaagccattcacagctattacagtgaccacggatcaagatgcaccttccctgataggtgtggtaaggaaggactgggcatcccaaaatagcattgccctatcatggcaagcacctgctttttccaatggagccattctggactacgagatcaagtactatgagaaagaacatgagcagctgacctactcttccacaaggtccaaagcccccagtgtcatcatcacaggtcttaagccagccaccaaatatgtatttcacatccgagtgagaactgcgacaggatacagtggctacagtcagaaatttgaatttgaaacaggagatgaaacttctgacatggcagcagaacaaggacagattctcgtgatagccaccgccgctgttgggggattcactctcctcgtcatcctcactttattcttcttgatcactgggagatgtcagtggtacataaaagccaagatgaagtcagaagagaagagaagaaaccacttacagaatgggcatttgcgcttcccgggaattaaaacttacattgatccagatacatatgaagacccatccctagcagtccatgaatttgcaaaggagattgatccctcaagaattcgtattgagagagtcattggggcaggtgaatttggagaagtctgtagtgggcgtttgaagacaccagggaaaagagagatcccagttgccattaaaactttgaaaggtggccacatggatcggcaaagaagagattttctaagagaagctagtatcatgggccagtttgaccatccaaacatcattcgcctagaaggggttgtcaccaaaagatccttcccggccattggggtggaggcgttttgccccagcttcctgagggcagggtttttaaatagcatccaggccccgcatccagtgccagggggaggatctttgccccccaggattcctgctggcagaccagtaatgattgtggtggaatatatggagaatggatccctagactcctttttgcggaagcatgatggccacttcacagtcatccagttggtcggaatgctccgaggcattgcatcaggcatgaagtatctttctgatatgggttatgttcatcgagacctagcggctcggaatatactggtcaatagcaacttagtatgcaaagtttctgattttggtctctccagagtgctggaagatgatccagaagctgcttatacaacaactgacctcttccaaactctaacacttaacctctgctattctgcataa

SEQ ID NO: 181 - protein, 942 aa, Homo Sapiens
MQFPSPPAARSSPAPQAASSSEAAAPATGQPGPSCPVPGTSRRGRPGTPPAGRVEEEEEEEEEDVDKDPHPTQNTCLRCRHFSLRERKREPRRTMGGCEVREFLLQFGFFLPLLTAWPGDCSHVSNNQVVLLDTTTVLGELGWKTYPLNGWDAITEMDEHNRPIHTYQVCNVMEPNQNNWLRTNWISRDAAQKIYVEMKFTLRDCNSIPWVLGTCKETFNLFYMESDESHGIKFKPNQYTKIDTIAADESFTQMDLGDRILKLNTEIREVGPIERKGFYLAFQDIGACIALVSVRVFYKKCPFTVRNLAMFPDTIPRVDSSSLVEARGSCVKSAEERDTPKLYCGADGDWLVPLGRCICSTGYEEIEGSCHACRPGFYKAFAGNTKCSKCPPHSLTYMEATSVCQCEKGYFRAEKDPPSMACTRPPSAPRNVVFNINETALILEWSPPSDTGGRKDLTYSVICKKCGLDTSQCEDCGGGLRFIPRHTGLINNSVIVLDFVSHVNYTFEIEAMNGVSELSFSPKPFTAITVTTDQDAPSLIGVVRKDWASQNSIALSWQAPAFSNGAILDYEIKYYEKEHEQLTYSSTRSKAPSVIITGLKPATKYVFHIRVRTATGYSGYSQKFEFETGDETSDMAAEQGQILVIATAAVGGFTLLVILTLFFLITGRCQWYIKAKMKSEEKRRNHLQNGHLRFPGIKTYIDPDTYEDPSLAVHEFAKEIDPSRIRIERVIGAGEFGEVCSGRLKTPGKREIPVAIKTLKGGHMDRQRRDFLREASIMGQFDHPNIIRLEGVVTKRSFPAIGVEAFCPSFLRAGFLNSIQAPHPVPGGGSLPPRIPAGRPVMIVVEYMENGSLDSFLRKHDGHFTVIQLVGMLRGIASGMKYLSDMGYVHRDLAARNILVNSNLVCKVSDFGLSRVLEDDPEAAYTTTDLFQTLTLNLCYSA

SEQ ID NO: 182 - DNA, 927 bp, Homo Sapiens
  CDS (1)...(927)
atggcagcagaacaaggacagattctcgtgatagccaccgccgctgttgggggattcactctcctcgtcatcctcactttattcttcttgatcactgggagatgtcagtggtacataaaagccaagatgaagtcagaagagaagagaagaaaccacttacagaatgggcatttgcgcttcccgggaattaaaacttacattgatccagatacatatgaagacccatccctagcagtccatgaatttgcaaaggagattgatccctcaagaattcgtattgagagagtcattggggcaggtgaatttggagaagtctgtagtgggcgtttgaagacaccagggaaaagagagatcccagttgccattaaaactttgaaaggtggccacatggatcggcaaagaagagattttctaagagaagctagtatcatgggccagtttgaccatccaaacatcattcgcctagaaggggttgtcaccaaaagatccttcccggccattggggtggaggcgttttgccccagcttcctgagggcagggtttttaaatagcatccaggccccgcatccagtgccagggggaggatctttgccccccaggattcctgctggcagaccagtaatgattgtggtggaatatatggagaatggatccctagactcctttttgcggaagcatgatggccacttcacagtcatccagttggtcggaatgctccgaggcattgcatcaggcatgaagtatctttctgatatgggttatgttcatcgagacctagcggctcggaatatactggtcaatagcaacttagtatgcaaagtttctgattttggtctctccagagtgctggaagatgatccagaagctgcttatacaacaactgacctcttccaaactctaacacttaacctctgctattctgcataa

SEQ ID NO: 183 - protein, 308 aa, Homo Sapiens
MAAEQGQILVIATAAVGGFTLLVILTLFFLITGRCQWYIKAKMKSEEKRRNHLQNGHLRFPGIKTYIDPDTYEDPSLAVHEFAKEIDPSRIRIERVIGAGEFGEVCSGRLKTPGKREIPVAIKTLKGGHMDRQRRDFLREASIMGQFDHPNIIRLEGVVTKRSFPAIGVEAFCPSFLRAGFLNSIQAPHPVPGGGSLPPRIPAGRPVMIVVEYMENGSLDSFLRKHDGHFTVIQLVGMLRGIASGMKYLSDMGYVHRDLAARNILVNSNLVCKVSDFGLSRVLEDDPEAAYTTTDLFQTLTLNLCYSA

SEQ ID NO: 184 - DNA, 3220 bp, Homo Sapiens
cggtcctcgcggtgaggggctccccgccccctcgctcccctcccccaaaccacagcccgagctcgttcttgcgcgcgcgcgctctctccggcccaagtgaatagtcctcgcgcaagtgggacactgtggtggatgcaattcccctcgcctccagccgcgaggagctccccggcgccgcaggcagcgtcctcctccgaagcagctgcacctgcaactgggcagcctggaccctcgtgccctgttcccgggacctcgcgcagggggcgccccgggacaccccctgcgggccgggtggaggaggaagaggaggaggaggaagaagacgtggacaaggacccccatcctacccagaacacctgcctgcgctgccgccacttctctttaagggagaggaaaagagagcctaggagaaccatggggggctgcgaagtccgggaatttcttttgcaatttggtttcttcttgcctctgctgacagcgtggccaggcgactgcagtcacgtctccaacaaccaagttgtgttgcttgatacaacaactgtactgggagagctaggatggaaaacatatccattaaatgggtgggatgccatcactgaaatggatgaacataataggcccattcacacataccaggtatgtaatgtaatggaaccaaaccaaaacaactggcttcgtacaaactggatctcccgtgatgcagctcagaaaatttatgtggaaatgaaattcacactaagggattgtaacagcatcccatgggtcttggggacttgcaaagaaacatttaatctgttttatatggaatcagatgagtcccacggaattaaattcaagccaaaccagtatacaaagatcgacacaattgctgctgatgagagttttacccagatggatttgggtgatcgcatcctcaaactcaacactgaaattcgtgaggtggggcctatagaaaggaaaggattttatctggcttttcaagacattggggcgtgcattgccctggtttcagtccgtgttttctacaagaaatgccccttcactgttcgtaacttggccatgtttcctgataccattccaagggttgattcctcctctttggttgaagcacggggttcttgtgtgaagagtgctgaagagcgtgacactcctaaactgtattgtggagctgatggagattggctggttcctcttggaaggtgcatctgcagtacaggatatgaagaaattgagggttcttgccatgcttgcagaccaggattctataaagcttttgctgggaacacaaaatgttctaaatgtcctccacacagtttaacatacatggaagcaacttctgtctgtcagtgtgaaaagggttatttccgagctgaaaaagacccaccttctatggcatgtaccaggccaccttcagctcctaggaatgtggtttttaacatcaatgaaacagcccttattttggaatggagcccaccaagtgacacaggagggagaaaagatctcacatacagtgtaatctgtaagaaatgtggcttagacaccagccagtgtgaggactgtggtggaggactccgcttcatcccaagacatacaggcctgatcaacaattccgtgatagtacttgactttgtgtctcacgtgaattacacctttgaaatagaagcaatgaatggagtttctgagttgagtttttctcccaagccattcacagctattacagtgaccacggatcaagatgcaccttccctgataggtgtggtaaggaaggactgggcatcccaaaatagcattgccctatcatggcaagcacctgctttttccaatggagccattctggactacgagatcaagtactatgagaaagaacatgagcagctgacctactcttccacaaggtccaaagcccccagtgtcatcatcacaggtcttaagccagccaccaaatatgtatttcacatccgagtgagaactgcgacaggatacagtggctacagtcagaaatttgaatttgaaacaggagatgaaacttctgacatggcagcagaacaaggacagattctcgtgatagccaccgccgctgttgggggattcactctcctcgtcatcctcactttattcttcttgatcactgggagatgtcagtggtacataaaagccaagatgaagtcagaagagaagagaagaaaccacttacagaatgggcatttgcgcttcccgggaattaaaacttacattgatccagatacatatgaagacccatccctagcagtccatgaatttgcaaaggagattgatccctcaagaattcgtattgagagagtcattggggcaggtgaatttggagaagtctgtagtgggcgtttgaagacaccagggaaaagagagatcccagttgccattaaaactttgaaaggtggccacatggatcggcaaagaagagattttctaagagaagctagtatcatgggccagtttgaccatccaaacatcattcgcctagaaggggttgtcaccaaaagatccttcccggccattggggtggaggcgttttgccccagcttcctgagggcagggtttttaaatagcatccaggccccgcatccagtgccagggggaggatctttgccccccaggattcctgctggcagaccagtaatgattgtggtggaatatatggagaatggatccctagactcctttttgcggaagcatgatggccacttcacagtcatccagttggtcggaatgctccgaggcattgcatcaggcatgaagtatctttctgatatgggttatgttcatcgagacctagcggctcggaatatactggtcaatagcaacttagtatgcaaagtttctgattttggtctctccagagtgctggaagatgatccagaagctgcttatacaacaactgacctcttccaaactctaacacttaacctctgctattctgcataaattctgagaaaagccaaattttctgtcggtctaagaagacatagcctacacccaactggagataattataaaaaataatgaagcagcatgaggggaaggtatttaatgtgtattttaaagttgggagagattctccttcacctaatttaggtgtttgtgaattggcttgactttttgaagttaatttttaagccttgaacatgtccaactttaagaactttaagaataaatattttaacacaagtgaaaaaaaaaaaaa

SEQ ID NO: 185 - DNA, 2079 bp, Homo Sapiens
  CDS (1)...(2079)
atggagaagtacgagcggatccgagtggtggggagaggtgccttcgggattgtgcacctgtgcctgcgaaaggctgaccagaagctggtgatcatcaagcagattccagtggaacagatgaccaaggaagagcggcaggcagcccagaatgagtgccaggtcctcaagctgctcaaccaccccaatgtcattgagtactacgagaacttcctggaagacaaagcccttatgatcgccatggaatatgcaccaggcggcactctggctgagttcatccaaaagcgctgtaattccctgctggaggaggagaccatcctgcacttcttcgtgcagatcctgcttgcactgcatcatgtgcacacccacctcatcctgcaccgagacctcaagacccagaacatcctgcttgacaaacaccgcatggtcgtcaagatcggtgatttcggcatctccaagatccttagcagcaagagcaaggcctacacggtggtgggtaccccatgctatatctcccctgagctgtgtgagggcaagccctacaaccagaagagtgacatctgggccctgggctgtgtcctctacgagctggccagcctcaagagggctttcgaggctgcgaacttgccagcactggtgctgaagatcatgagtggcacctttgcacctatctctgaccggtacagccctgagcttcgccagctggtcctgagtctactcagcctggagcctgcccagcggccaccactcagccacatcatggcacagcccctctgcatccgtgccctcctcaacctccacaccgacgtgggcagtgtccgcatgcggagggcagagaagtccgtggcccccagcaacacagggagcaggaccaccagtgtccgctgcagaggtatcccccggggacctgtgaggccagccatcccaccaccactgtcgtcagtgtatgcctggggtggtgggctgggcacccccctgcggctgccaatgctcaacacagaggtggtccaggtggcagctgggcgcacgcagaaagccggcgtcacgcgctctgggcgtctcatcctgtgggaggccccacccctaggtgcaggcggaggcagtctccttcctggggcagtggagcagccacagccccagttcatctcgcgtttcctggagggccagtcgggygtgaccatcaagcacgtggcctgtggggacttcttcactgcctgcctgactgacagaggcatcatcatgacattcggcagcggcagcaatgggtgcctaggccatggcagcctcactgacatcagccagcccaccattgtggaggctttgytgggctatgaaatggtgcaggtggcctgtggggcctctcacgtgctggccctgtccactgagcgagaactatttgcctggggccgtggagacagcggcagactggggctaggcaccagggagtcccacagctgcccccagcaggtgcccatgcccccaggacaggaagctcagcgagttgtatgtggtatcgattcctccatgatcctcactgtgcctggccaagccctagcctgtgggagcaacaggttcaacaagctgggcctggaccacctctccctgggggaggagcctgtcccccaccagcaagtggaggaggccctgagcttcacactactaggctctgcacccctggaccaggagcctctgctgagtatagacctgggcactgctcactcagctgctgtgactgcctcgggtgattgctacacttttggcagcaatcagcacggacagttgggcaccaatactcgccgaggcagtcgggcaccctgtaaggtccaaggccttgagggcatcaagatggcaatggtagcctgtggggatgccttcactgtagctattggggcagagagcgaagtgtactcttggggcaaaggggcgcgaggtcgattgggaaggagggatgaggatgccggactccctcggccagtgcagttggatgagacacacccttacacggtgacttccgtgtcctgttgccatggaaacaccctcctggctgttcgatcggtcacagatgagccggtccccccctga

SEQ ID NO: 186 - protein, 692 aa, Homo Sapiens
  VARIANT 390, 441: Xaa = Any Amino Acid
MEKYERIRVVGRGAFGIVHLCLRKADQKLVIIKQIPVEQMTKEERQAAQNECQVLKLLNHPNVIEYYENFLEDKALMIAMEYAPGGTLAEFIQKRCNSLLEEETILHFFVQILLALHHVHTHLILHRDLKTQNILLDKHRMVVKIGDFGISKILSSKSKAYTVVGTPCYISPELCEGKPYNQKSDIWALGCVLYELASLKRAFEAANLPALVLKIMSGTFAPISDRYSPELRQLVLSLLSLEPAQRPPLSHIMAQPLCIRALLNLHTDVGSVRMRRAEKSVAPSNTGSRTTSVRCRGIPRGPVRPAIPPPLSSVYAWGGGLGTPLRLPMLNTEVVQVAAGRTQKAGVTRSGRLILWEAPPLGAGGGSLLPGAVEQPQPQFISRFLEGQSXVTIKHVACGDFFTACLTDRGIIMTFGSGSNGCLGHGSLTDISQPTIVEALXGYEMVQVACGASHVLALSTERELFAWGRGDSGRLGLGTRESHSCPQQVPMPPGQEAQRVVCGIDSSMILTVPGQALACGSNRFNKLGLDHLSLGEEPVPHQQVEEALSFTLLGSAPLDQEPLLSIDLGTAHSAAVTASGDCYTFGSNQHGQLGTNTRRGSRAPCKVQGLEGIKMAMVACGDAFTVAIGAESEVYSWGKGARGRLGRRDEDAGLPRPVQLDETHPYTVTSVSCCHGNTLLAVRSVTDEPVPP

SEQ ID NO: 187 - DNA, 2454 bp, Homo Sapiens
  CDS (1)...(2454)
atgcccgccgccactccagccccgcagccgccgccgcccccggcccggccagccccagcctgcccggcgcggcctgccccgggacagcaaggcctatgtgaccattctctaaaatatttaagctcgagaatcacagagcggaagctgcaaggctcctggctgcctgccagccgagggaatctggagaaaccattcctggggccgcgtggccccgtcgtgcccttgttctgccctcggaatggccttcactcagcacatcctgagaacagccctctgaagcccagggtcgtgaccgtagtgaagctgggtgggcagcgcccccgaaagatcactctgctcctcaacaggcgatcagtgcagacgttcgagcagctcttagctgacatctcagaagccttgggctctcccagatggaagaatgaccgtgtgaggaaactgtttaacctcaagggcagggaaatcaggagcgtctctgatttcttcagggaaggggatgctttcatagctatgggcaaagaaccactgacactgaagagcattcaggtggctgtagaagaactgtaccccaacaaagcccgggccctgacactggcccagcacagccgtgccccttctccaaggctgaggagcaggctgtttagcaaggctctgaaaggagaccaccgctgtggggagaccgagacccccaagagctgcagcgaagttgcaggatgcaaggcagccatgaggcaccaggggaagatccccgaggagctttcactagatgacagagcgaggacccagaagaagtgggggagggggaaatgggagccagaacccagtagcaagccccccagggaagccactctggaagagaggcacgcaaggggagagaagcatcttggggtggagattgaaaagacctcgggtgaaattatcagatgcgagaagtgcaagagagagagggagcttcagcagagcctggagcgtgagaggctttctctggggaccagtgagctggatatggggaagggcccaatgtatgatgtggagaagctggtgaggaccagaagctgcaggaggtctcccgaggcaaatcctgcaagtggggaggaagggtggaagggtgacagccacaggagcagccccaggaatcccactcaagagctgaggagacccagcaagagcatggacaagaaagaggacagaggcccagaggatcaagaaagccatgctcagggagcagccaaggccaagaaggaccttgtggaagttcttcctgtcacagaggaggggctgagggaggtgaagaaggacaccaggcccatgagcaggagcaaacatggtggctggctcctgagagagcaccaggcgggctttgagaagctccgcaggacccgaggagaagagaaggaggcagagaaggagaaaaagccatgtatgtctggaggcagaaggatgactctcagagatgaccaacctgcaaagctagaaaaggagcccaagacgaggccagaagagaacaagccagagcggcccagcggtcggaagccacggcccatgggcatcattgccgccaatgtggaaaagcattatgagactggccgggtcattggggatgggaactttgctgtcgtgaaggagtgcagacaccgcgagaccaggcaggcctatgcgatgaagatcattgacaagtccagactcaagggcaaggaggacatggtggacagtgagatcttgatcatccagagcctctctcaccccaacatcgtgaaattgcatgaagtctacgaaacagacatggaaatctacctgatcctggagtacgtgcagggaggagacctttttgacgccatcatagaaagtgtgaagttcccggagcccgatgctgccctcatgatcatggacttatgcaaagccctcgtccacatgcacgacaagagcattgtccaccgggacctcaagccggaaaaccttttggttcagcgaaatgaggacaaatctactaccttgaaattggctgattttggacttgcaaagcatgtggtgagacctatatttactgtgtgtgggaccccaacttacgtagctcccgaaattctttctgagaaaggttatggactggaggtggacatgtgggctgctggcgtgatcctctatatcctgctgtgtggctttcccccattccgcagccctgagagggaccaggacgagctctttaacatcatccagctgggccactttgagttcctccccccttactgggacaatatctctgatgctgctaaagatctggtgagccggttgctggtggtagaccccaaaaagcgctacacagctcatcaggttcttcagcacccctggatcgaaacagctggcaagaccaatacagtgaaacgacagaagcaggtgtcccccagcagcgatggtcacttccggagccagcacaagagggttgtggagcaggtatcatag

SEQ ID NO: 188 - protein, 817 aa, Homo Sapiens
MPAATPAPQPPPPPARPAPACPARPAPGQQGLCDHSLKYLSSRITERKLQGSWLPASRGNLEKPFLGPRGPVVPLFCPRNGLHSAHPENSPLKPRVVTVVKLGGQRPRKITLLLNRRSVQTFEQLLADISEALGSPRWKNDRVRKLFNLKGREIRSVSDFFREGDAFIAMGKEPLTLKSIQVAVEELYPNKARALTLAQHSRAPSPRLRSRLFSKALKGDHRCGETETPKSCSEVAGCKAAMRHQGKIPEELSLDDRARTQKKWGRGKWEPEPSSKPPREATLEERHARGEKHLGVEIEKTSGEIIRCEKCKRERELQQSLERERLSLGTSELDMGKGPMYDVEKLVRTRSCRRSPEANPASGEEGWKGDSHRSSPRNPTQELRRPSKSMDKKEDRGPEDQESHAQGAAKAKKDLVEVLPVTEEGLREVKKDTRPMSRSKHGGWLLREHQAGFEKLRRTRGEEKEAEKEKKPCMSGGRRMTLRDDQPAKLEKEPKTRPEENKPERPSGRKPRPMGIIAANVEKHYETGRVIGDGNFAVVKECRHRETRQAYAMKIIDKSRLKGKEDMVDSEILIIQSLSHPNIVKLHEVYETDMEIYLILEYVQGGDLFDAIIESVKFPEPDAALMIMDLCKALVHMHDKSIVHRDLKPENLLVQRNEDKSTTLKLADFGLAKHVVRPIFTVCGTPTYVAPEILSEKGYGLEVDMWAAGVILYILLCGFPPFRSPERDQDELFNIIQLGHFEFLPPYWDNISDAAKDLVSRLLVVDPKKRYTAHQVLQHPWIETAGKTNTVKRQKQVSPSSDGHFRSQHKRVVEQVS

SEQ ID NO: 189 - DNA, 2824 bp, Homo Sapiens
cgggctcgtggctgctcgtctcgccccgccttcccgcgcctgctcgaccgtcgagccgcgtccccgcgctgccacctctgctccaggctctccccgagcccgccgccgcgccatgcccgccgccactccagccccgcagccgccgccgcccccggcccggccagccccagcctgcccggcgcggcctgccccgggacagcaaggcctatgtgaccattctctaaaatatttaagctcgagaatcacagagcggaagctgcaaggctcctggctgcctgccagccgagggaatctggagaaaccattcctggggccgcgtggccccgtcgtgcccttgttctgccctcggaatggccttcactcagcacatcctgagaacagccctctgaagcccagggtcgtgaccgtagtgaagctgggtgggcagcgcccccgaaagatcactctgctcctcaacaggcgatcagtgcagacgttcgagcagctcttagctgacatctcagaagccttgggctctcccagatggaagaatgaccgtgtgaggaaactgtttaacctcaagggcagggaaatcaggagcgtctctgatttcttcagggaaggggatgctttcatagctatgggcaaagaaccactgacactgaagagcattcaggtggctgtagaagaactgtaccccaacaaagcccgggccctgacactggcccagcacagccgtgccccttctccaaggctgaggagcaggctgtttagcaaggctctgaaaggagaccaccgctgtggggagaccgagacccccaagagctgcagcgaagttgcaggatgcaaggcagccatgaggcaccaggggaagatccccgaggagctttcactagatgacagagcgaggacccagaagaagtgggggagggggaaatgggagccagaacccagtagcaagccccccagggaagccactctggaagagaggcacgcaaggggagagaagcatcttggggtggagattgaaaagacctcgggtgaaattatcagatgcgagaagtgcaagagagagagggagcttcagcagagcctggagcgtgagaggctttctctggggaccagtgagctggatatggggaagggcccaatgtatgatgtggagaagctggtgaggaccagaagctgcaggaggtctcccgaggcaaatcctgcaagtggggaggaagggtggaagggtgacagccacaggagcagccccaggaatcccactcaagagctgaggagacccagcaagagcatggacaagaaagaggacagaggcccagaggatcaagaaagccatgctcagggagcagccaaggccaagaaggaccttgtggaagttcttcctgtcacagaggaggggctgagggaggtgaagaaggacaccaggcccatgagcaggagcaaacatggtggctggctcctgagagagcaccaggcgggctttgagaagctccgcaggacccgaggagaagagaaggaggcagagaaggagaaaaagccatgtatgtctggaggcagaaggatgactctcagagatgaccaacctgcaaagctagaaaaggagcccaagacgaggccagaagagaacaagccagagcggcccagcggtcggaagccacggcccatgggcatcattgccgccaatgtggaaaagcattatgagactggccgggtcattggggatgggaactttgctgtcgtgaaggagtgcagacaccgcgagaccaggcaggcctatgcgatgaagatcattgacaagtccagactcaagggcaaggaggacatggtggacagtgagatcttgatcatccagagcctctctcaccccaacatcgtgaaattgcatgaagtctacgaaacagacatggaaatctacctgatcctggagtacgtgcagggaggagacctttttgacgccatcatagaaagtgtgaagttcccggagcccgatgctgccctcatgatcatggacttatgcaaagccctcgtccacatgcacgacaagagcattgtccaccgggacctcaagccggaaaaccttttggttcagcgaaatgaggacaaatctactaccttgaaattggctgattttggacttgcaaagcatgtggtgagacctatatttactgtgtgtgggaccccaacttacgtagctcccgaaattctttctgagaaaggttatggactggaggtggacatgtgggctgctggcgtgatcctctatatcctgctgtgtggctttcccccattccgcagccctgagagggaccaggacgagctctttaacatcatccagctgggccactttgagttcctccccccttactgggacaatatctctgatgctgctaaagatctggtgagccggttgctggtggtagaccccaaaaagcgctacacagctcatcaggttcttcagcacccctggatcgaaacagctggcaagaccaatacagtgaaacgacagaagcaggtgtcccccagcagcgatggtcacttccggagccagcacaagagggttgtggagcaggtatcatagtcaccaccttgggaatctgtccagcccccagttctgctcaaggacagagaaaaggatagaagtttgagagaaaaacaatgaaagaggcttcttcacataattggtgaatcagagggagagacactgagtatattttaaagcatattaaaaaaattaagtcaatgttaaatgtcacaacatatttttagatttgtatatttaaagcctttaatacatttttggggggtaagcattgtcatcagtgaggaattttggtaa

SEQ ID NO: 190 - DNA, 3111 bp, Homo Sapiens
  CDS (1)...(3111)
atggctttgcggggcgccgcgggagcgaccgacaccccggtgtcctcggccgggggagcccccggcggctcagcgtcctcgtcgtccacctcctcgggcggctcggcctcggcgggcgcggggctgtgggccgcgctctatgactacgaggctcgcggcgaggacgagctgagcctgcggcgcggccagctggtggaggtgctgtcgcaggacgccgccgtgtcgggcgacgagggctggtgggcaggccaggtgcagcggcgcctcggcatcttccccgccaactacgtggctccctgccgcccggccgccagccccgcgccgccgccctcgcggcccagctccccggtacacgtcgccttcgagcggctggagctgaaggagctcatcggcgctgggggcttcgggcaggtgtaccgcgccacctggcagggccaggaggtggccgtgaaggcggcgcgccaggacccggagcaggacgcggcggcggctgccgagagcgtgcggcgcgaggctcggctcttcgccatgctgcggcaccccaacatcatcgagctgcgcggcgtgtgcctgcagcagccgcacctctgcctggtgctggagttcgcccgcggcggagcgctcaaccgagcgctggccgctgccaacgccgccccggacccgcgcgcgcccggcccccgccgcgcgcgccgcatccctccgcacgtgctggtcaactgggccgtgcagatagcgcggggcatgctctacctgcatgaggaggccttcgtgcccatcctgcaccgggacctcaagtccagcaacattttgctacttgagaagatagaacatgatgacatctgcaataaaactttgaagattacagattttgggttggcgagggaatggcacaggaccaccaaaatgagcacagcaggcacctatgcctggatggcccccgaagtgatcaagtcttccttgttttctaagggaagcgacatctggagctatggagtgctgctgtgggaactgctcaccggagaagtcccctatcggggcattgatggcctcgccgtggcttatggggtagcagtcaataaactcactttgcccattccatccacctgccctgagccgtttgccaagctcatgaaagaatgctggcaacaagaccctcatattcgtccatcgtttgccttaattctcgaacagttgactgctattgaaggggcagtgatgactgagatgcctcaagaatcttttcattccatgcaagatgactggaaactagaaattcaacaaatgtttgatgagttgagaacaaaggaaaaggagctgcgatcccgggaagaggagctgactcgggcggctctgcagcagaagtctcaggaggagctgctaaagcggcgtgagcagcagctggcagagcgcgagatcgacgtgctggagcgggaacttaacattctgatattccagctaaaccaggagaagcccaaggtaaagaagaggaagggcaagtttaagagaagtcgtttaaagctcaaagatggacatcgaatcagtttaccttcagatttccagcacaagataaccgtgcaggcctctcccaacttggacaaacggcggagcctgaacagcagcagttccagtcccccgagcagccccacaatgatgccccgactccgagccatacagttgacttcagatgaaagcaataaaacttggggaaggaacacagtctttcgacaagaagaatttgaggatgtaaaaaggaattttaagaaaaaaggttgtacctggggaccaaattccattcaaatgaaagatagaacagattgcaaagaaaggataagacctctctccgatggcaacagtccttggtcaactatcttaataaaaaatcagaaaaccatgcccttggcttcattgtttgtggaccagccagggtcctgtgaagagccaaaactttcccctgatggattagaacacagaaaaccaaaacaaataaaattgcctagtcaggcctacattgatctacctcttgggaaagatgctcagagagagaatcctgcagaagctgaaagctgggaggaggcagcctctgcgaatgctgccacagtctccattgagatgactcctacgaatagtctgagtagatccccccagagaaagaaaacggagtcagctctgtatgggtgcaccrtccttctggcatcggtggctctgggactggacctcagagakcttcataaagcacaggctgctgaagaaccgttgcccaaggaagagaagaagaaacgagagggaatcttccagcgggcttccaagtcccgcagaagygccagtcctcccacaagcctgccatccacckgtggggaggccagcagcccaccctccctgccactgtcaagtgccctgggcatcctctccacaccttctttctccacaaagtgcctgctgcagatggacagtgaagatccactggtggacagtgcacctgtcacttgtgactctgagatgctcactccggatttttgtcccactgccccaggaagtggtcgtgagccagccctcatgccaagacttgacactgattgtagtgtatcaagaaacttgccgtcttccttcctacagcagacatgtgggaatgtaccttactgtgcttcttcaaaacatagaccrtcacatcacagacggaccatgtctgatggaaatccgaccccaactggtgcaactattatctcagccactggagcctctgcactgccactctgcccctcacctgmtcytcacwgtcatctgccaagggaggtctcacccaagaagcacagcactgtccacatcgtgcctcagcgtcgccctgcctccctgagaagccgctcagatctgcctcaggcttacccacagacagcagtgtctcagctggcacagactgcctgtgtagtgggtcgcccaggaccacatcccacccaattcctcgctgccaaggagagaactaaatcccatgtgccttcattactggatgctgacgtggaaggtcagagcagggactacactgtgccactgtgcagaatgaggagcaaaaccagccggccatctatatatgaactggagaaagaattcctgtcttaa

SEQ ID NO: 191 - protein, 1036 aa, Homo Sapiens
  VARIANT 728, 741, 773, 784, 887, 922, 923, 925: Xaa = Any Amino Acid
MALRGAAGATDTPVSSAGGAPGGSASSSSTSSGGSASAGAGLWAALYDYEARGEDELSLRRGQLVEVLSQDAAVSGDEGWWAGQVQRRLGIFPANYVAPCRPAASPAPPPSRPSSPVHVAFERLELKELIGAGGFGQVYRATWQGQEVAVKAARQDPEQDAAAAAESVRREARLFAMLRHPNIIELRGVCLQQPHLCLVLEFARGGALNRALAAANAAPDPRAPGPRRARRIPPHVLVNWAVQIARGMLYLHEEAFVPILHRDLKSSNILLLEKIEHDDICNKTLKITDFGLAREWHRTTKMSTAGTYAWMAPEVIKSSLFSKGSDIWSYGVLLWELLTGEVPYRGIDGLAVAYGVAVNKLTLPIPSTCPEPFAKLMKECWQQDPHIRPSFALILEQLTAIEGAVMTEMPQESFHSMQDDWKLEIQQMFDELRTKEKELRSREEELTRAALQQKSQEELLKRREQQLAEREIDVLERELNILIFQLNQEKPKVKKRKGKFKRSRLKLKDGHRISLPSDFQHKITVQASPNLDKRRSLNSSSSSPPSSPTMMPRLRAIQLTSDESNKTWGRNTVFRQEEFEDVKRNFKKKGCTWGPNSIQMKDRTDCKERIRPLSDGNSPWSTILIKNQKTMPLASLFVDQPGSCEEPKLSPDGLEHRKPKQIKLPSQAYIDLPLGKDAQRENPAEAESWEEAASANAATVSIEMTPTNSLSRSPQRKKTESALYGCTXLLASVALGLDLRXLHKAQAAEEPLPKEEKKKREGIFQRASKSRRXASPPTSLPSTXGEASSPPSLPLSSALGILSTPSFSTKCLLQMDSEDPLVDSAPVTCDSEMLTPDFCPTAPGSGREPALMPRLDTDCSVSRNLPSSFLQQTCGNVPYCASSKHRXSHHRRTMSDGNPTPTGATIISATGASALPLCPSPXXHXHLPREVSPKKHSTVHIVPQRRPASLRSRSDLPQAYPQTAVSQLAQTACVVGRPGPHPTQFLAAKERTKSHVPSLLDADVEGQSRDYTVPLCRMRSKTSRPSIYELEKEFLS

SEQ ID NO: 192 - DNA, 3518 bp, Homo Sapiens
gcagcgccctgggcacgaccatggtgggacgtcgcccgcggcttcggggaccgctgcggcagcagaggcggctggccaggaacgcgggccgaggctggaccctttgggcagctagcccgtgatctctgccgtcaccgatcgcgattcctaccccctcgccttcccccggcgccgacggccacaccgccggacgatgcgcgcccgcggccgcccgggaggctgagcccagcttcccgctccgccttccccgcgcagctgcccccatggctttgcggggcgccgcgggagcgaccgacaccccggtgtcctcggccgggggagcccccggcggctcagcgtcctcgtcgtccacctcctcgggcggctcggcctcggcgggcgcggggctgtgggccgcgctctatgactacgaggctcgcggcgaggacgagctgagcctgcggcgcggccagctggtggaggtgctgtcgcaggacgccgccgtgtcgggcgacgagggctggtgggcaggccaggtgcagcggcgcctcggcatcttccccgccaactacgtggctccctgccgcccggccgccagccccgcgccgccgccctcgcggcccagctccccggtacacgtcgccttcgagcggctggagctgaaggagctcatcggcgctgggggcttcgggcaggtgtaccgcgccacctggcagggccaggaggtggccgtgaaggcggcgcgccaggacccggagcaggacgcggcggcggctgccgagagcgtgcggcgcgaggctcggctcttcgccatgctgcggcaccccaacatcatcgagctgcgcggcgtgtgcctgcagcagccgcacctctgcctggtgctggagttcgcccgcggcggagcgctcaaccgagcgctggccgctgccaacgccgccccggacccgcgcgcgcccggcccccgccgcgcgcgccgcatccctccgcacgtgctggtcaactgggccgtgcagatagcgcggggcatgctctacctgcatgaggaggccttcgtgcccatcctgcaccgggacctcaagtccagcaacattttgctacttgagaagatagaacatgatgacatctgcaataaaactttgaagattacagattttgggttggcgagggaatggcacaggaccaccaaaatgagcacagcaggcacctatgcctggatggcccccgaagtgatcaagtcttccttgttttctaagggaagcgacatctggagctatggagtgctgctgtgggaactgctcaccggagaagtcccctatcggggcattgatggcctcgccgtggcttatggggtagcagtcaataaactcactttgcccattccatccacctgccctgagccgtttgccaagctcatgaaagaatgctggcaacaagaccctcatattcgtccatcgtttgccttaattctcgaacagttgactgctattgaaggggcagtgatgactgagatgcctcaagaatcttttcattccatgcaagatgactggaaactagaaattcaacaaatgtttgatgagttgagaacaaaggaaaaggagctgcgatcccgggaagaggagctgactcgggcggctctgcagcagaagtctcaggaggagctgctaaagcggcgtgagcagcagctggcagagcgcgagatcgacgtgctggagcgggaacttaacattctgatattccagctaaaccaggagaagcccaaggtaaagaagaggaagggcaagtttaagagaagtcgtttaaagctcaaagatggacatcgaatcagtttaccttcagatttccagcacaagataaccgtgcaggcctctcccaacttggacaaacggcggagcctgaacagcagcagttccagtcccccgagcagccccacaatgatgccccgactccgagccatacagttgacttcagatgaaagcaataaaacttggggaaggaacacagtctttcgacaagaagaatttgaggatgtaaaaaggaattttaagaaaaaaggttgtacctggggaccaaattccattcaaatgaaagatagaacagattgcaaagaaaggataagacctctctccgatggcaacagtccttggtcaactatcttaataaaaaatcagaaaaccatgcccttggcttcattgtttgtggaccagccagggtcctgtgaagagccaaaactttcccctgatggattagaacacagaaaaccaaaacaaataaaattgcctagtcaggcctacattgatctacctcttgggaaagatgctcagagagagaatcctgcagaagctgaaagctgggaggaggcagcctctgcgaatgctgccacagtctccattgagatgactcctacgaatagtctgagtagatccccccagagaaagaaaacggagtcagctctgtatgggtgcaccrtccttctggcatcggtggctctgggactggacctcagagakcttcataaagcacaggctgctgaagaaccgttgcccaaggaagagaagaagaaacgagagggaatcttccagcgggcttccaagtcccgcagaagygccagtcctcccacaagcctgccatccacckgtggggaggccagcagcccaccctccctgccactgtcaagtgccctgggcatcctctccacaccttctttctccacaaagtgcctgctgcagatggacagtgaagatccactggtggacagtgcacctgtcacttgtgactctgagatgctcactccggatttttgtcccactgccccaggaagtggtcgtgagccagccctcatgccaagacttgacactgattgtagtgtatcaagaaacttgccgtcttccttcctacagcagacatgtgggaatgtaccttactgtgcttcttcaaaacatagaccrtcacatcacagacggaccatgtctgatggaaatccgaccccaactggtgcaactattatctcagccactggagcctctgcactgccactctgcccctcacctgmtcytcacwgtcatctgccaagggaggtctcacccaagaagcacagcactgtccacatcgtgcctcagcgtcgccctgcctccctgagaagccgctcagatctgcctcaggcttacccacagacagcagtgtctcagctggcacagactgcctgtgtagtgggtcgcccaggaccacatcccacccaattcctcgctgccaaggagagaactaaatcccatgtgccttcattactggatgctgacgtggaaggtcagagcagggactacactgtgccactgtgcagaatgaggagcaaaaccagccggccatctatatatgaactggagaaagaattcctgtcttaaactaagtgccttactgttgtttaagcatttttttaaggtgaacaaatgaacacaatgtatctacctttgaactgtttcatgctgctgtgttttcaaaagctgtggccatgttcctaaattagtaagatatatccagcttctcaa

SEQ ID NO: 193 - DNA, 2613 bp, Homo Sapiens
  CDS (1)...(2613)
atgtcagggctggtgctgatgctggcggcgcggtgcattgtgggcagctccccgctctgccgctgccgccgccgtcgcccaaggaggatcggggccgggccgggccgggatgatccgggtcggaaggccgccgccgccggagggagcgggtcacccaacgccgcactgagccgcccccgccccgccccggccccgggggatgcgccgccccgagctgctgcctccgccgccgccgcagccgcagccgcagcgggcacagagcaggtagatggccccctcagggcaggcccggcggacacccctccctctggctggcggatgcagtgcctagcggccgcccttaaggacgaaaccaacatgagtgggggaggggagcaggccgacatcctgccggccaactacgtggtcaaggatcgctggaaggtgctgaaaaagatcgggggcgggggctttggtgagatctacgaggccatggacctgctgaccagggagaatgtggccctcaaggtggagtcagcccagcagcccaagcaggtcctcaagatggaggtggccgtgctcaagaagttgcaagggaaggaccatgtgtgcaggttcattggctgtggcaggaacgagaagtttaactatgtagtgatgcagctccagggccggaacctggccgacctgcgccgtagccagccgcgaggcaccttcacgctgagcaccacattgcggctgggcaagcagatcttggagtccatcgaggccatccactctgtgggcttcctgcaccgtgacatcaagccttcaaactttgccatgggcaggctgccctccacctacaggaagtgctatatgctggacttcgggctggcccggcagtacaccaacaccacgggggatgtgcggccccctcggaatgtggccgggtttcgaggaacggttcgctatgcctcagtcaatgcccacaagaaccgggagatgggccgccacgacgacctgtggtccctcttctacatgctggtggagtttgcagtgggccagctgccctggaggaagatcaaggacaaggaacaggtagggatgatcaaggagaagtatgagcaccggatgctgctgaagcacatgccgtcagagttccacctcttcctggaccacattgccagcctcgactacttcaccaagcccgactaccagttgatcatgtcagtgtttgagaacagcatgaaggagaggggcattgccgagaatgaggcctttgactgggagaaggcaggcaccgatgccctcctgtccacgagcacctctaccccgccccagcagaacacccggcagacggcagccatgtttggggtggtcaatgtgacgccagtgcctggggacctgctccgggagaacaccgaggatgtgctacagggagagcacctgagtgaccaggagaatgcacccccaattctgcccgggaggccctctgaggggctgggccccagtccccaccttgtcccccaccccgggggtcctgaggctgaagtctgggaggagacagatgtcaaccggaacaaactccggatcaacatcggcaaaagcccctgtgtggaggaggaacagagccgaggcatgggggtccccagctccccagtgcgtgcccccccagactcccccacaaccccagtccgttctctgcgctaccggagggtgaacagccctgagtcagaaaggctgtccacggcggacgggcgagtggagctacctgagaggaggtcacggatggatctgcctggctcgccctcgcgccaggcctgctcctctcagccagcccagatgctgtcagtggacacaggccacgctgaccgacaggccagtggccgcatggaygtgtcagcctctgtggagcaggaggccctgagcaacgccttccgctcggtgccgctggctgaggaggaggatttcgacagcaaagagtgggtcatcatcgacaaggagacggagctcaaggacttccctccaggggctgagcccagcacatcgggcaccacggatgaggagcccgaggagctgcggccactgcccgaggagggcgaagagcggcggcggctgggggcagagcccaccgtccggccccggggacgcagcatgcaggcgctggcggaggaggacctgcagcatttgccgccccagcccctgccaccccagctgagccaggscgatggccgttccgagacgtcacagccccccacgcctggcagcccttcccactcacccctgcactcgggaccccgccctcgacggagagagtcggaccccacaggcccacagagacagttggaggaggacagactctcggggcactccctcccgcggtacagccccctgcgacgactggcgtcctccgtgttctcctcctccacgctggagacggagcattaccctcaccccggcggcggcggctcctcgggctcctccggttccctcattcagcgcagccgctcggctgagagcagccctgtgcgggcgccccaccggcgccacgcgcccctcgctgctggcaaccacagactcatgccctcggtgctccgcatctcgcggtcccagctgcagcaggtgtgggcccggttcacccacaagacctag

SEQ ID NO: 194 - protein, 870 aa, Homo Sapiens
  VARIANT 729: Xaa = Any Amino Acid
MSGLVLMLAARCIVGSSPLCRCRRRRPRRIGAGPGRDDPGRKAAAAGGSGSPNAALSRPRPAPAPGDAPPRAAASAAAAAAAAAGTEQVDGPLRAGPADTPPSGWRMQCLAAALKDETNMSGGGEQADILPANYVVKDRWKVLKKIGGGGFGEIYEAMDLLTRENVALKVESAQQPKQVLKMEVAVLKKLQGKDHVCRFIGCGRNEKFNYVVMQLQGRNLADLRRSQPRGTFTLSTTLRLGKQILESIEAIHSVGFLHRDIKPSNFAMGRLPSTYRKCYMLDFGLARQYTNTTGDVRPPRNVAGFRGTVRYASVNAHKNREMGRHDDLWSLFYMLVEFAVGQLPWRKIKDKEQVGMIKEKYEHRMLLKHMPSEFHLFLDHIASLDYFTKPDYQLIMSVFENSMKERGIAENEAFDWEKAGTDALLSTSTSTPPQQNTRQTAAMFGVVNVTPVPGDLLRENTEDVLQGEHLSDQENAPPILPGRPSEGLGPSPHLVPHPGGPEAEVWEETDVNRNKLRINIGKSPCVEEEQSRGMGVPSSPVRAPPDSPTTPVRSLRYRRVNSPESERLSTADGRVELPERRSRMDLPGSPSRQACSSQPAQMLSVDTGHADRQASGRMDVSASVEQEALSNAFRSVPLAEEEDFDSKEWVIIDKETELKDFPPGAEPSTSGTTDEEPEELRPLPEEGEERRRLGAEPTVRPRGRSMQALAEEDLQHLPPQPLPPQLSQXDGRSETSQPPTPGSPSHSPLHSGPRPRRRESDPTGPQRQLEEDRLSGHSLPRYSPLRRLASSVFSSSTLETEHYPHPGGGGSSGSSGSLIQRSRSAESSPVRAPHRRHAPLAAGNHRLMPSVLRISRSQLQQVWARFTHKT

SEQ ID NO: 195 - DNA, 2595 bp, Homo Sapiens
  CDS (1)...(2595)
atgctggcggcgcggtgcattgtgggcagctccccgctctgccgctgccgccgccgtcgcccaaggaggatcggggccgggccgggccgggatgatccgggtcggaaggccgccgccgccggagggagcgggtcacccaacgccgcactgagccgcccccgccccgccccggccccgggggatgcgccgccccgagctgctgcctccgccgccgccgcagccgcagccgcagcgggcacagagcaggtagatggccccctcagggcaggcccggcggacacccctccctctggctggcggatgcagtgcctagcggccgcccttaaggacgaaaccaacatgagtgggggaggggagcaggccgacatcctgccggccaactacgtggtcaaggatcgctggaaggtgctgaaaaagatcgggggcgggggctttggtgagatctacgaggccatggacctgctgaccagggagaatgtggccctcaaggtggagtcagcccagcagcccaagcaggtcctcaagatggaggtggccgtgctcaagaagttgcaagggaaggaccatgtgtgcaggttcattggctgtggcaggaacgagaagtttaactatgtagtgatgcagctccagggccggaacctggccgacctgcgccgtagccagccgcgaggcaccttcacgctgagcaccacattgcggctgggcaagcagatcttggagtccatcgaggccatccactctgtgggcttcctgcaccgtgacatcaagccttcaaactttgccatgggcaggctgccctccacctacaggaagtgctatatgctggacttcgggctggcccggcagtacaccaacaccacgggggatgtgcggccccctcggaatgtggccgggtttcgaggaacggttcgctatgcctcagtcaatgcccacaagaaccgggagatgggccgccacgacgacctgtggtccctcttctacatgctggtggagtttgcagtgggccagctgccctggaggaagatcaaggacaaggaacaggtagggatgatcaaggagaagtatgagcaccggatgctgctgaagcacatgccgtcagagttccacctcttcctggaccacattgccagcctcgactacttcaccaagcccgactaccagttgatcatgtcagtgtttgagaacagcatgaaggagaggggcattgccgagaatgaggcctttgactgggagaaggcaggcaccgatgccctcctgtccacgagcacctctaccccgccccagcagaacacccggcagacggcagccatgtttggggtggtcaatgtgacgccagtgcctggggacctgctccgggagaacaccgaggatgtgctacagggagagcacctgagtgaccaggagaatgcacccccaattctgcccgggaggccctctgaggggctgggccccagtccccaccttgtcccccaccccgggggtcctgaggctgaagtctgggaggagacagatgtcaaccggaacaaactccggatcaacatcggcaaaagcccctgtgtggaggaggaacagagccgaggcatgggggtccccagctccccagtgcgtgcccccccagactcccccacaaccccagtccgttctctgcgctaccggagggtgaacagccctgagtcagaaaggctgtccacggcggacgggcgagtggagctacctgagaggaggtcacggatggatctgcctggctcgccctcgcgccaggcctgctcctctcagccagcccagatgctgtcagtggacacaggccacgctgaccgacaggccagtggccgcatggaygtgtcagcctctgtggagcaggaggccctgagcaacgccttccgctcggtgccgctggctgaggaggaggatttcgacagcaaagagtgggtcatcatcgacaaggagacggagctcaaggacttccctccaggggctgagcccagcacatcgggcaccacggatgaggagcccgaggagctgcggccactgcccgaggagggcgaagagcggcggcggctgggggcagagcccaccgtccggccccggggacgcagcatgcaggcgctggcggaggaggacctgcagcatttgccgccccagcccctgccaccccagctgagccaggscgatggccgttccgagacgtcacagccccccacgcctggcagcccttcccactcacccctgcactcgggaccccgccctcgacggagagagtcggaccccacaggcccacagagacagttggaggaggacagactctcggggcactccctcccgcggtacagccccctgcgacgactggcgtcctccgtgttctcctcctccacgctggagacggagcattaccctcaccccggcggcggcggctcctcgggctcctccggttccctcattcagcgcagccgctcggctgagagcagccctgtgcgggcgccccaccggcgccacgcgcccctcgctgctggcaaccacagactcatgccctcggtgctccgcatctcgcggtcccagctgcagcaggtgtgggcccggttcacccacaagacctag

SEQ ID NO: 196 - protein, 864 aa, Homo Sapiens
  VARIANT 723: Xaa = Any Amino Acid
MLAARCIVGSSPLCRCRRRRPRRIGAGPGRDDPGRKAAAAGGSGSPNAALSRPRPAPAPGDAPPRAAASAAAAAAAAAGTEQVDGPLRAGPADTPPSGWRMQCLAAALKDETNMSGGGEQADILPANYVVKDRWKVLKKIGGGGFGEIYEAMDLLTRENVALKVESAQQPKQVLKMEVAVLKKLQGKDHVCRFIGCGRNEKFNYVVMQLQGRNLADLRRSQPRGTFTLSTTLRLGKQILESIEAIHSVGFLHRDIKPSNFAMGRLPSTYRKCYMLDFGLARQYTNTTGDVRPPRNVAGFRGTVRYASVNAHKNREMGRHDDLWSLFYMLVEFAVGQLPWRKIKDKEQVGMIKEKYEHRMLLKHMPSEFHLFLDHIASLDYFTKPDYQLIMSVFENSMKERGIAENEAFDWEKAGTDALLSTSTSTPPQQNTRQTAAMFGVVNVTPVPGDLLRENTEDVLQGEHLSDQENAPPILPGRPSEGLGPSPHLVPHPGGPEAEVWEETDVNRNKLRINIGKSPCVEEEQSRGMGVPSSPVRAPPDSPTTPVRSLRYRRVNSPESERLSTADGRVELPERRSRMDLPGSPSRQACSSQPAQMLSVDTGHADRQASGRMDVSASVEQEALSNAFRSVPLAEEEDFDSKEWVIIDKETELKDFPPGAEPSTSGTTDEEPEELRPLPEEGEERRRLGAEPTVRPRGRSMQALAEEDLQHLPPQPLPPQLSQXDGRSETSQPPTPGSPSHSPLHSGPRPRRRESDPTGPQRQLEEDRLSGHSLPRYSPLRRLASSVFSSSTLETEHYPHPGGGGSSGSSGSLIQRSRSAESSPVRAPHRRHAPLAAGNHRLMPSVLRISRSQLQQVWARFTHKT

SEQ ID NO: 197 - DNA, 2295 bp, Homo Sapiens
  CDS (1)...(2295)
atgcagtgcctagcggccgcccttaaggacgaaaccaacatgagtgggggaggggagcaggccgacatcctgccggccaactacgtggtcaaggatcgctggaaggtgctgaaaaagatcgggggcgggggctttggtgagatctacgaggccatggacctgctgaccagggagaatgtggccctcaaggtggagtcagcccagcagcccaagcaggtcctcaagatggaggtggccgtgctcaagaagttgcaagggaaggaccatgtgtgcaggttcattggctgtggcaggaacgagaagtttaactatgtagtgatgcagctccagggccggaacctggccgacctgcgccgtagccagccgcgaggcaccttcacgctgagcaccacattgcggctgggcaagcagatcttggagtccatcgaggccatccactctgtgggcttcctgcaccgtgacatcaagccttcaaactttgccatgggcaggctgccctccacctacaggaagtgctatatgctggacttcgggctggcccggcagtacaccaacaccacgggggatgtgcggccccctcggaatgtggccgggtttcgaggaacggttcgctatgcctcagtcaatgcccacaagaaccgggagatgggccgccacgacgacctgtggtccctcttctacatgctggtggagtttgcagtgggccagctgccctggaggaagatcaaggacaaggaacaggtagggatgatcaaggagaagtatgagcaccggatgctgctgaagcacatgccgtcagagttccacctcttcctggaccacattgccagcctcgactacttcaccaagcccgactaccagttgatcatgtcagtgtttgagaacagcatgaaggagaggggcattgccgagaatgaggcctttgactgggagaaggcaggcaccgatgccctcctgtccacgagcacctctaccccgccccagcagaacacccggcagacggcagccatgtttggggtggtcaatgtgacgccagtgcctggggacctgctccgggagaacaccgaggatgtgctacagggagagcacctgagtgaccaggagaatgcacccccaattctgcccgggaggccctctgaggggctgggccccagtccccaccttgtcccccaccccgggggtcctgaggctgaagtctgggaggagacagatgtcaaccggaacaaactccggatcaacatcggcaaaagcccctgtgtggaggaggaacagagccgaggcatgggggtccccagctccccagtgcgtgcccccccagactcccccacaaccccagtccgttctctgcgctaccggagggtgaacagccctgagtcagaaaggctgtccacggcggacgggcgagtggagctacctgagaggaggtcacggatggatctgcctggctcgccctcgcgccaggcctgctcctctcagccagcccagatgctgtcagtggacacaggccacgctgaccgacaggccagtggccgcatggaygtgtcagcctctgtggagcaggaggccctgagcaacgccttccgctcggtgccgctggctgaggaggaggatttcgacagcaaagagtgggtcatcatcgacaaggagacggagctcaaggacttccctccaggggctgagcccagcacatcgggcaccacggatgaggagcccgaggagctgcggccactgcccgaggagggcgaagagcggcggcggctgggggcagagcccaccgtccggccccggggacgcagcatgcaggcgctggcggaggaggacctgcagcatttgccgccccagcccctgccaccccagctgagccaggscgatggccgttccgagacgtcacagccccccacgcctggcagcccttcccactcacccctgcactcgggaccccgccctcgacggagagagtcggaccccacaggcccacagagacagttggaggaggacagactctcggggcactccctcccgcggtacagccccctgcgacgactggcgtcctccgtgttctcctcctccacgctggagacggagcattaccctcaccccggcggcggcggctcctcgggctcctccggttccctcattcagcgcagccgctcggctgagagcagccctgtgcgggcgccccaccggcgccacgcgcccctcgctgctggcaaccacagactcatgccctcggtgctccgcatctcgcggtcccagctgcagcaggtgtgggcccggttcacccacaagacctag

SEQ ID NO: 198 - protein, 764 aa, Homo Sapiens
  VARIANT 623: Xaa = Any Amino Acid
MQCLAAALKDETNMSGGGEQADILPANYVVKDRWKVLKKIGGGGFGEIYEAMDLLTRENVALKVESAQQPKQVLKMEVAVLKKLQGKDHVCRFIGCGRNEKFNYVVMQLQGRNLADLRRSQPRGTFTLSTTLRLGKQILESIEAIHSVGFLHRDIKPSNFAMGRLPSTYRKCYMLDFGLARQYTNTTGDVRPPRNVAGFRGTVRYASVNAHKNREMGRHDDLWSLFYMLVEFAVGQLPWRKIKDKEQVGMIKEKYEHRMLLKHMPSEFHLFLDHIASLDYFTKPDYQLIMSVFENSMKERGIAENEAFDWEKAGTDALLSTSTSTPPQQNTRQTAAMFGVVNVTPVPGDLLRENTEDVLQGEHLSDQENAPPILPGRPSEGLGPSPHLVPHPGGPEAEVWEETDVNRNKLRINIGKSPCVEEEQSRGMGVPSSPVRAPPDSPTTPVRSLRYRRVNSPESERLSTADGRVELPERRSRMDLPGSPSRQACSSQPAQMLSVDTGHADRQASGRMDVSASVEQEALSNAFRSVPLAEEEDFDSKEWVIIDKETELKDFPPGAEPSTSGTTDEEPEELRPLPEEGEERRRLGAEPTVRPRGRSMQALAEEDLQHLPPQPLPPQLSQXDGRSETSQPPTPGSPSHSPLHSGPRPRRRESDPTGPQRQLEEDRLSGHSLPRYSPLRRLASSVFSSSTLETEHYPHPGGGGSSGSSGSLIQRSRSAESSPVRAPHRRHAPLAAGNHRLMPSVLRISRSQLQQVWARFTHKT

SEQ ID NO: 199 - DNA, 2256 bp, Homo Sapiens
  CDS (1)...(2256)
atgagtgggggaggggagcaggccgacatcctgccggccaactacgtggtcaaggatcgctggaaggtgctgaaaaagatcgggggcgggggctttggtgagatctacgaggccatggacctgctgaccagggagaatgtggccctcaaggtggagtcagcccagcagcccaagcaggtcctcaagatggaggtggccgtgctcaagaagttgcaagggaaggaccatgtgtgcaggttcattggctgtggcaggaacgagaagtttaactatgtagtgatgcagctccagggccggaacctggccgacctgcgccgtagccagccgcgaggcaccttcacgctgagcaccacattgcggctgggcaagcagatcttggagtccatcgaggccatccactctgtgggcttcctgcaccgtgacatcaagccttcaaactttgccatgggcaggctgccctccacctacaggaagtgctatatgctggacttcgggctggcccggcagtacaccaacaccacgggggatgtgcggccccctcggaatgtggccgggtttcgaggaacggttcgctatgcctcagtcaatgcccacaagaaccgggagatgggccgccacgacgacctgtggtccctcttctacatgctggtggagtttgcagtgggccagctgccctggaggaagatcaaggacaaggaacaggtagggatgatcaaggagaagtatgagcaccggatgctgctgaagcacatgccgtcagagttccacctcttcctggaccacattgccagcctcgactacttcaccaagcccgactaccagttgatcatgtcagtgtttgagaacagcatgaaggagaggggcattgccgagaatgaggcctttgactgggagaaggcaggcaccgatgccctcctgtccacgagcacctctaccccgccccagcagaacacccggcagacggcagccatgtttggggtggtcaatgtgacgccagtgcctggggacctgctccgggagaacaccgaggatgtgctacagggagagcacctgagtgaccaggagaatgcacccccaattctgcccgggaggccctctgaggggctgggccccagtccccaccttgtcccccaccccgggggtcctgaggctgaagtctgggaggagacagatgtcaaccggaacaaactccggatcaacatcggcaaaagcccctgtgtggaggaggaacagagccgaggcatgggggtccccagctccccagtgcgtgcccccccagactcccccacaaccccagtccgttctctgcgctaccggagggtgaacagccctgagtcagaaaggctgtccacggcggacgggcgagtggagctacctgagaggaggtcacggatggatctgcctggctcgccctcgcgccaggcctgctcctctcagccagcccagatgctgtcagtggacacaggccacgctgaccgacaggccagtggccgcatggaygtgtcagcctctgtggagcaggaggccctgagcaacgccttccgctcggtgccgctggctgaggaggaggatttcgacagcaaagagtgggtcatcatcgacaaggagacggagctcaaggacttccctccaggggctgagcccagcacatcgggcaccacggatgaggagcccgaggagctgcggccactgcccgaggagggcgaagagcggcggcggctgggggcagagcccaccgtccggccccggggacgcagcatgcaggcgctggcggaggaggacctgcagcatttgccgccccagcccctgccaccccagctgagccaggscgatggccgttccgagacgtcacagccccccacgcctggcagcccttcccactcacccctgcactcgggaccccgccctcgacggagagagtcggaccccacaggcccacagagacagttggaggaggacagactctcggggcactccctcccgcggtacagccccctgcgacgactggcgtcctccgtgttctcctcctccacgctggagacggagcattaccctcaccccggcggcggcggctcctcgggctcctccggttccctcattcagcgcagccgctcggctgagagcagccctgtgcgggcgccccaccggcgccacgcgcccctcgctgctggcaaccacagactcatgccctcggtgctccgcatctcgcggtcccagctgcagcaggtgtgggcccggttcacccacaagacctag

SEQ ID NO: 200 - protein, 751 aa, Homo Sapiens
  VARIANT 610: Xaa = Any Amino Acid
MSGGGEQADILPANYVVKDRWKVLKKIGGGGFGEIYEAMDLLTRENVALKVESAQQPKQVLKMEVAVLKKLQGKDHVCRFIGCGRNEKFNYVVMQLQGRNLADLRRSQPRGTFTLSTTLRLGKQILESIEAIHSVGFLHRDIKPSNFAMGRLPSTYRKCYMLDFGLARQYTNTTGDVRPPRNVAGFRGTVRYASVNAHKNREMGRHDDLWSLFYMLVEFAVGQLPWRKIKDKEQVGMIKEKYEHRMLLKHMPSEFHLFLDHIASLDYFTKPDYQLIMSVFENSMKERGIAENEAFDWEKAGTDALLSTSTSTPPQQNTRQTAAMFGVVNVTPVPGDLLRENTEDVLQGEHLSDQENAPPILPGRPSEGLGPSPHLVPHPGGPEAEVWEETDVNRNKLRINIGKSPCVEEEQSRGMGVPSSPVRAPPDSPTTPVRSLRYRRVNSPESERLSTADGRVELPERRSRMDLPGSPSRQACSSQPAQMLSVDTGHADRQASGRMDVSASVEQEALSNAFRSVPLAEEEDFDSKEWVIIDKETELKDFPPGAEPSTSGTTDEEPEELRPLPEEGEERRRLGAEPTVRPRGRSMQALAEEDLQHLPPQPLPPQLSQXDGRSETSQPPTPGSPSHSPLHSGPRPRRRESDPTGPQRQLEEDRLSGHSLPRYSPLRRLASSVFSSSTLETEHYPHPGGGGSSGSSGSLIQRSRSAESSPVRAPHRRHAPLAAGNHRLMPSVLRISRSQLQQVWARFTHKT

SEQ ID NO: 201 - DNA, 1965 bp, Homo Sapiens
  CDS (1)...(1965)
atgtcagggctggtgctgatgctggcggcgcggtgcattgtgggcagctccccgctctgccgctgccgccgccgtcgcccaaggaggatcggggccgggccgggccgggatgatccgggtcggaaggccgccgccgccggagggagcgggtcacccaacgccgcactgagccgcccccgccccgccccggccccgggggatgcgccgccccgagctgctgcctccgccgccgccgcagccgcagccgcagcgggcacagagcaggtagatggccccctcagggcaggcccggcggacacccctccctctggctggcggatgcagtgcctagcggccgcccttaaggacgaaaccaacatgagtgggggaggggagcaggccgacatcctgccggccaactacgtggtcaaggatcgctggaaggtgctgaaaaagatcgggggcgggggctttggtgagatctacgaggccatggacctgctgaccagggagaatgtggccctcaaggtggagtcagcccagcagcccaagcaggtcctcaagatggaggtggccgtgctcaagaagttgcaagggaaggaccatgtgtgcaggttcattggctgtggcaggaacgagaagtttaactatgtagtgatgcagctccagggccggaacctggccgacctgcgccgtagccagccgcgaggcaccttcacgctgagcaccacattgcggctgggcaagcagatcttggagtccatcgaggccatccactctgtgggcttcctgcaccgtgacatcaagccttcaaactttgccatgggcaggctgccctccacctacaggaagtgctatatgctggacttcgggctggcccggcagtacaccaacaccacgggggatgtgcggccccctcggaatgtggccgggtttcgaggaacggttcgctatgcctcagtcaatgcccacaagaaccgggagatgggccgccacgacgacctgtggtccctcttctacatgctggtggagtttgcagtgggccagctgccctggaggaagatcaaggacaaggaacaggtagggatgatcaaggagaagtatgagcaccggatgctgctgaagcacatgccgtcagagttccacctcttcctggaccacattgccagcctcgactacttcaccaagcccgactaccagttgatcatgtcagtgtttgagaacagcatgaaggagaggggcattgccgagaatgaggcctttgactgggagaaggcaggcaccgatgccctcctgtccacgagcacctctaccccgccccagcagaacacccggcagacggcagccatgtttggggtggtcaatgtgacgccagtgcctggggacctgctccgggagaacaccgaggatgtgctacagggagagcacctgagtgaccaggagaatgcacccccaattctgcccgggaggccctctgaggggctgggccccagtccccaccttgtcccccaccccgggggtcctgaggctgaagtctgggaggagacagatgtcaaccggaacaaactccggatcaacatcggcaaaagcccctgtgtggaggaggaacagagccgaggcatgggggtccccagctccccagtgcgtgcccccccagactcccccacaaccccagtccgttctctgcgctaccggagggtgaacagccctgagtcagaaaggctgtccacggcggacgggcgagtggagctacctgagaggaggtgggtctggggccaggggcatggttggggcccaaggccctctccgccttcacgtggctggtctggaggaaaagttagatgtgtggcggaggtgggcagaccctgggaagtgctgagagggttatacttgggcctggggtcagactcagttggggccasagacagggcctgggaraaccagtgggggatccagagaggtcccggctcatgccaggaaacgtaa

SEQ ID NO: 202 - protein, 654 aa, Homo Sapiens
  VARIANT 634: Xaa = Any Amino Acid
MSGLVLMLAARCIVGSSPLCRCRRRRPRRIGAGPGRDDPGRKAAAAGGSGSPNAALSRPRPAPAPGDAPPRAAASAAAAAAAAAGTEQVDGPLRAGPADTPPSGWRMQCLAAALKDETNMSGGGEQADILPANYVVKDRWKVLKKIGGGGFGEIYEAMDLLTRENVALKVESAQQPKQVLKMEVAVLKKLQGKDHVCRFIGCGRNEKFNYVVMQLQGRNLADLRRSQPRGTFTLSTTLRLGKQILESIEAIHSVGFLHRDIKPSNFAMGRLPSTYRKCYMLDFGLARQYTNTTGDVRPPRNVAGFRGTVRYASVNAHKNREMGRHDDLWSLFYMLVEFAVGQLPWRKIKDKEQVGMIKEKYEHRMLLKHMPSEFHLFLDHIASLDYFTKPDYQLIMSVFENSMKERGIAENEAFDWEKAGTDALLSTSTSTPPQQNTRQTAAMFGVVNVTPVPGDLLRENTEDVLQGEHLSDQENAPPILPGRPSEGLGPSPHLVPHPGGPEAEVWEETDVNRNKLRINIGKSPCVEEEQSRGMGVPSSPVRAPPDSPTTPVRSLRYRRVNSPESERLSTADGRVELPERRWVWGQGHGWGPRPSPPSRGWSGGKVRCVAEVGRPWEVLRGLYLGLGSDSVGAXDRAWENQWGIQRGPGSCQET

SEQ ID NO: 203 - DNA, 1947 bp, Homo Sapiens
  CDS (1)...(1947)
atgctggcggcgcggtgcattgtgggcagctccccgctctgccgctgccgccgccgtcgcccaaggaggatcggggccgggccgggccgggatgatccgggtcggaaggccgccgccgccggagggagcgggtcacccaacgccgcactgagccgcccccgccccgccccggccccgggggatgcgccgccccgagctgctgcctccgccgccgccgcagccgcagccgcagcgggcacagagcaggtagatggccccctcagggcaggcccggcggacacccctccctctggctggcggatgcagtgcctagcggccgcccttaaggacgaaaccaacatgagtgggggaggggagcaggccgacatcctgccggccaactacgtggtcaaggatcgctggaaggtgctgaaaaagatcgggggcgggggctttggtgagatctacgaggccatggacctgctgaccagggagaatgtggccctcaaggtggagtcagcccagcagcccaagcaggtcctcaagatggaggtggccgtgctcaagaagttgcaagggaaggaccatgtgtgcaggttcattggctgtggcaggaacgagaagtttaactatgtagtgatgcagctccagggccggaacctggccgacctgcgccgtagccagccgcgaggcaccttcacgctgagcaccacattgcggctgggcaagcagatcttggagtccatcgaggccatccactctgtgggcttcctgcaccgtgacatcaagccttcaaactttgccatgggcaggctgccctccacctacaggaagtgctatatgctggacttcgggctggcccggcagtacaccaacaccacgggggatgtgcggccccctcggaatgtggccgggtttcgaggaacggttcgctatgcctcagtcaatgcccacaagaaccgggagatgggccgccacgacgacctgtggtccctcttctacatgctggtggagtttgcagtgggccagctgccctggaggaagatcaaggacaaggaacaggtagggatgatcaaggagaagtatgagcaccggatgctgctgaagcacatgccgtcagagttccacctcttcctggaccacattgccagcctcgactacttcaccaagcccgactaccagttgatcatgtcagtgtttgagaacagcatgaaggagaggggcattgccgagaatgaggcctttgactgggagaaggcaggcaccgatgccctcctgtccacgagcacctctaccccgccccagcagaacacccggcagacggcagccatgtttggggtggtcaatgtgacgccagtgcctggggacctgctccgggagaacaccgaggatgtgctacagggagagcacctgagtgaccaggagaatgcacccccaattctgcccgggaggccctctgaggggctgggccccagtccccaccttgtcccccaccccgggggtcctgaggctgaagtctgggaggagacagatgtcaaccggaacaaactccggatcaacatcggcaaaagcccctgtgtggaggaggaacagagccgaggcatgggggtccccagctccccagtgcgtgcccccccagactcccccacaaccccagtccgttctctgcgctaccggagggtgaacagccctgagtcagaaaggctgtccacggcggacgggcgagtggagctacctgagaggaggtgggtctggggccaggggcatggttggggcccaaggccctctccgccttcacgtggctggtctggaggaaaagttagatgtgtggcggaggtgggcagaccctgggaagtgctgagagggttatacttgggcctggggtcagactcagttggggccasagacagggcctgggaraaccagtgggggatccagagaggtcccggctcatgccaggaaacgtaa

SEQ ID NO: 204 - protein, 648 aa, Homo Sapiens
  VARIANT 628: Xaa = Any Amino Acid
MLAARCIVGSSPLCRCRRRRPRRIGAGPGRDDPGRKAAAAGGSGSPNAALSRPRPAPAPGDAPPRAAASAAAAAAAAAGTEQVDGPLRAGPADTPPSGWRMQCLAAALKDETNMSGGGEQADILPANYVVKDRWKVLKKIGGGGFGEIYEAMDLLTRENVALKVESAQQPKQVLKMEVAVLKKLQGKDHVCRFIGCGRNEKFNYVVMQLQGRNLADLRRSQPRGTFTLSTTLRLGKQILESIEAIHSVGFLHRDIKPSNFAMGRLPSTYRKCYMLDFGLARQYTNTTGDVRPPRNVAGFRGTVRYASVNAHKNREMGRHDDLWSLFYMLVEFAVGQLPWRKIKDKEQVGMIKEKYEHRMLLKHMPSEFHLFLDHIASLDYFTKPDYQLIMSVFENSMKERGIAENEAFDWEKAGTDALLSTSTSTPPQQNTRQTAAMFGVVNVTPVPGDLLRENTEDVLQGEHLSDQENAPPILPGRPSEGLGPSPHLVPHPGGPEAEVWEETDVNRNKLRINIGKSPCVEEEQSRGMGVPSSPVRAPPDSPTTPVRSLRYRRVNSPESERLSTADGRVELPERRWVWGQGHGWGPRPSPPSRGWSGGKVRCVAEVGRPWEVLRGLYLGLGSDSVGAXDRAWENQWGIQRGPGSCQET

SEQ ID NO: 205 - DNA, 1647 bp, Homo Sapiens
  CDS (1)...(1647)
atgcagtgcctagcggccgcccttaaggacgaaaccaacatgagtgggggaggggagcaggccgacatcctgccggccaactacgtggtcaaggatcgctggaaggtgctgaaaaagatcgggggcgggggctttggtgagatctacgaggccatggacctgctgaccagggagaatgtggccctcaaggtggagtcagcccagcagcccaagcaggtcctcaagatggaggtggccgtgctcaagaagttgcaagggaaggaccatgtgtgcaggttcattggctgtggcaggaacgagaagtttaactatgtagtgatgcagctccagggccggaacctggccgacctgcgccgtagccagccgcgaggcaccttcacgctgagcaccacattgcggctgggcaagcagatcttggagtccatcgaggccatccactctgtgggcttcctgcaccgtgacatcaagccttcaaactttgccatgggcaggctgccctccacctacaggaagtgctatatgctggacttcgggctggcccggcagtacaccaacaccacgggggatgtgcggccccctcggaatgtggccgggtttcgaggaacggttcgctatgcctcagtcaatgcccacaagaaccgggagatgggccgccacgacgacctgtggtccctcttctacatgctggtggagtttgcagtgggccagctgccctggaggaagatcaaggacaaggaacaggtagggatgatcaaggagaagtatgagcaccggatgctgctgaagcacatgccgtcagagttccacctcttcctggaccacattgccagcctcgactacttcaccaagcccgactaccagttgatcatgtcagtgtttgagaacagcatgaaggagaggggcattgccgagaatgaggcctttgactgggagaaggcaggcaccgatgccctcctgtccacgagcacctctaccccgccccagcagaacacccggcagacggcagccatgtttggggtggtcaatgtgacgccagtgcctggggacctgctccgggagaacaccgaggatgtgctacagggagagcacctgagtgaccaggagaatgcacccccaattctgcccgggaggccctctgaggggctgggccccagtccccaccttgtcccccaccccgggggtcctgaggctgaagtctgggaggagacagatgtcaaccggaacaaactccggatcaacatcggcaaaagcccctgtgtggaggaggaacagagccgaggcatgggggtccccagctccccagtgcgtgcccccccagactcccccacaaccccagtccgttctctgcgctaccggagggtgaacagccctgagtcagaaaggctgtccacggcggacgggcgagtggagctacctgagaggaggtgggtctggggccaggggcatggttggggcccaaggccctctccgccttcacgtggctggtctggaggaaaagttagatgtgtggcggaggtgggcagaccctgggaagtgctgagagggttatacttgggcctggggtcagactcagttggggccasagacagggcctgggaraaccagtgggggatccagagaggtcccggctcatgccaggaaacgtaa

SEQ ID NO: 206 - protein, 548 aa, Homo Sapiens
  VARIANT 528: Xaa = Any Amino Acid
MQCLAAALKDETNMSGGGEQADILPANYVVKDRWKVLKKIGGGGFGEIYEAMDLLTRENVALKVESAQQPKQVLKMEVAVLKKLQGKDHVCRFIGCGRNEKFNYVVMQLQGRNLADLRRSQPRGTFTLSTTLRLGKQILESIEAIHSVGFLHRDIKPSNFAMGRLPSTYRKCYMLDFGLARQYTNTTGDVRPPRNVAGFRGTVRYASVNAHKNREMGRHDDLWSLFYMLVEFAVGQLPWRKIKDKEQVGMIKEKYEHRMLLKHMPSEFHLFLDHIASLDYFTKPDYQLIMSVFENSMKERGIAENEAFDWEKAGTDALLSTSTSTPPQQNTRQTAAMFGVVNVTPVPGDLLRENTEDVLQGEHLSDQENAPPILPGRPSEGLGPSPHLVPHPGGPEAEVWEETDVNRNKLRINIGKSPCVEEEQSRGMGVPSSPVRAPPDSPTTPVRSLRYRRVNSPESERLSTADGRVELPERRWVWGQGHGWGPRPSPPSRGWSGGKVRCVAEVGRPWEVLRGLYLGLGSDSVGAXDRAWENQWGIQRGPGSCQET

SEQ ID NO: 207 - DNA, 1608 bp, Homo Sapiens
  CDS (1)...(1608)
atgagtgggggaggggagcaggccgacatcctgccggccaactacgtggtcaaggatcgctggaaggtgctgaaaaagatcgggggcgggggctttggtgagatctacgaggccatggacctgctgaccagggagaatgtggccctcaaggtggagtcagcccagcagcccaagcaggtcctcaagatggaggtggccgtgctcaagaagttgcaagggaaggaccatgtgtgcaggttcattggctgtggcaggaacgagaagtttaactatgtagtgatgcagctccagggccggaacctggccgacctgcgccgtagccagccgcgaggcaccttcacgctgagcaccacattgcggctgggcaagcagatcttggagtccatcgaggccatccactctgtgggcttcctgcaccgtgacatcaagccttcaaactttgccatgggcaggctgccctccacctacaggaagtgctatatgctggacttcgggctggcccggcagtacaccaacaccacgggggatgtgcggccccctcggaatgtggccgggtttcgaggaacggttcgctatgcctcagtcaatgcccacaagaaccgggagatgggccgccacgacgacctgtggtccctcttctacatgctggtggagtttgcagtgggccagctgccctggaggaagatcaaggacaaggaacaggtagggatgatcaaggagaagtatgagcaccggatgctgctgaagcacatgccgtcagagttccacctcttcctggaccacattgccagcctcgactacttcaccaagcccgactaccagttgatcatgtcagtgtttgagaacagcatgaaggagaggggcattgccgagaatgaggcctttgactgggagaaggcaggcaccgatgccctcctgtccacgagcacctctaccccgccccagcagaacacccggcagacggcagccatgtttggggtggtcaatgtgacgccagtgcctggggacctgctccgggagaacaccgaggatgtgctacagggagagcacctgagtgaccaggagaatgcacccccaattctgcccgggaggccctctgaggggctgggccccagtccccaccttgtcccccaccccgggggtcctgaggctgaagtctgggaggagacagatgtcaaccggaacaaactccggatcaacatcggcaaaagcccctgtgtggaggaggaacagagccgaggcatgggggtccccagctccccagtgcgtgcccccccagactcccccacaaccccagtccgttctctgcgctaccggagggtgaacagccctgagtcagaaaggctgtccacggcggacgggcgagtggagctacctgagaggaggtgggtctggggccaggggcatggttggggcccaaggccctctccgccttcacgtggctggtctggaggaaaagttagatgtgtggcggaggtgggcagaccctgggaagtgctgagagggttatacttgggcctggggtcagactcagttggggccasagacagggcctgggaraaccagtgggggatccagagaggtcccggctcatgccaggaaacgtaa

SEQ ID NO: 208 - protein, 535 aa, Homo Sapiens
  VARIANT 515: Xaa = Any Amino Acid
MSGGGEQADILPANYVVKDRWKVLKKIGGGGFGEIYEAMDLLTRENVALKVESAQQPKQVLKMEVAVLKKLQGKDHVCRFIGCGRNEKFNYVVMQLQGRNLADLRRSQPRGTFTLSTTLRLGKQILESIEAIHSVGFLHRDIKPSNFAMGRLPSTYRKCYMLDFGLARQYTNTTGDVRPPRNVAGFRGTVRYASVNAHKNREMGRHDDLWSLFYMLVEFAVGQLPWRKIKDKEQVGMIKEKYEHRMLLKHMPSEFHLFLDHIASLDYFTKPDYQLIMSVFENSMKERGIAENEAFDWEKAGTDALLSTSTSTPPQQNTRQTAAMFGVVNVTPVPGDLLRENTEDVLQGEHLSDQENAPPILPGRPSEGLGPSPHLVPHPGGPEAEVWEETDVNRNKLRINIGKSPCVEEEQSRGMGVPSSPVRAPPDSPTTPVRSLRYRRVNSPESERLSTADGRVELPERRWVWGQGHGWGPRPSPPSRGWSGGKVRCVAEVGRPWEVLRGLYLGLGSDSVGAXDRAWENQWGIQRGPGSCQET

SEQ ID NO: 209 - DNA, 2688 bp, Homo Sapiens
  CDS (1)...(2688)
atgtcagggctggtgctgatgctggcggcgcggtgcattgtgggcagctccccgctctgccgctgccgccgccgtcgcccaaggaggatcggggccgggccgggccgggatgatccgggtcggaaggccgccgccgccggagggagcgggtcacccaacgccgcactgagccgcccccgccccgccccggccccgggggatgcgccgccccgagctgctgcctccgccgccgccgcagccgcagccgcagcgggcacagagcaggtagatggccccctcagggcaggcccggcggacacccctccctctggctggcggatgcagtgcctagcggccgcccttaaggacgaaaccaacatgagtgggggaggggagcaggccgacatcctgccggccaactacgtggtcaaggatcgctggaaggtgctgaaaaagatcgggggcgggggctttggtgagatctacgaggccatggacctgctgaccagggagaatgtggccctcaaggtggagtcagcccagcagcccaagcaggtcctcaagatggaggtggccgtgctcaagaagttgcaagggaaggaccatgtgtgcaggttcattggctgtggcaggaacgagaagtttaactatgtagtgatgcagctccagggccggaacctggccgacctgcgccgtagccagccgcgaggcaccttcacgctgagcaccacattgcggctgggcaagcagatcttggagtccatcgaggccatccactctgtgggcttcctgcaccgtgacatcaagccttcaaactttgccatgggcaggctgccctccacctacaggaagtgctatatgctggacttcgggctggcccggcagtacaccaacaccacgggggatgtgcggccccctcggaatgtggccgggtttcgaggaacggttcgctatgcctcagtcaatgcccacaagaaccgggagatgggccgccacgacgacctgtggtccctcttctacatgctggtggagtttgcagtgggccagctgccctggaggaagatcaaggacaaggaacaggtagggatgatcaaggagaagtatgagcaccggatgctgctgaagcacatgccgtcagagttccacctcttcctggaccacattgccagcctcgactacttcaccaagcccgactaccagttgatcatgtcagtgtttgagaacagcatgaaggagaggggcattgccgagaatgaggcctttgactgggagaaggcaggcaccgatgccctcctgtccacgagcacctctaccccgccccagcagaacacccggcagacggcagccatgtttggggtggtcaatgtgacgccagtgcctggggacctgctccgggagaacaccgaggatgtgctacagggagagcacctgagtgaccaggagaatgcacccccaattctgcccgggaggccctctgaggggctgggccccagtccccaccttgtcccccaccccgggggtcctgaggctgaagtctgggaggagacagatgtcaaccggaacaaactccggatcaacatcggcaaaagcccctgtgtggaggaggaacagagccgaggcatgggggtccccagctccccagtgcgtgcccccccagactcccccacaaccccagtccgttctctgcgctaccggagggtgaacagccctgagtcagaaaggctgtccacggcggacgggcgagtggagctacctgagaggaggtcacggatggatctgcctggctcgccctcgcgccaggcctgctcctctcagccagcccagatgctgtcagtggacacaggccacgctgaccgacaggccagtggccgcatggaygtgtcagcctctgtggagcaggaggccctgagcaacgccttccgctcggtgccgctggctgaggaggaggatttcgacagcaaagagtgggtcatcatcgacaaggagacggagctcaaggacttccctccaggggctgagcccagcacatcgggcaccacggatgaggagcccgaggagctgcggccactgcccgaggagggcgaagagcggcggcggctgggggcagagcccaccgtccggccccggggacgcagcatgcaggcgctggcggaggaggacctgcagcatttgccgccccagcccctgccaccccagctgagccaggscgatggccgttccgagacgtcacagccccccacgcctggcagcccttcccactcacccctgcactcgggaccccgccctcgacggagagagtcggaccccacaggcccacagagacaggctggagtgcaatggcgtgatctcggctcactgcaacctccacctcccaggttcaagcaattctcctgcctcagcctcccgagaagctgggattacaggcatgcaccaccaccacacccggctaattttgtatttttagtagagacggggtttctccatgttgaggctggtcttgagctcctgacctcaggtgatctgcctgcctcggcctcccaaattgctgggattacaggcgtgagccatcgcgcccagcctgaggtctgtgagtttaacagaaaacatacaggccagagagagcagatggtttgtgcaggatcagagagagcctggagcatgcgtgacctgcccgggcggccgctcgagccctatagtgagtcgtattag

SEQ ID NO: 210 - protein, 895 aa, Homo Sapiens
  VARIANT 729: Xaa = Any Amino Acid
MSGLVLMLAARCIVGSSPLCRCRRRRPRRIGAGPGRDDPGRKAAAAGGSGSPNAALSRPRPAPAPGDAPPRAAASAAAAAAAAAGTEQVDGPLRAGPADTPPSGWRMQCLAAALKDETNMSGGGEQADILPANYVVKDRWKVLKKIGGGGFGEIYEAMDLLTRENVALKVESAQQPKQVLKMEVAVLKKLQGKDHVCRFIGCGRNEKFNYVVMQLQGRNLADLRRSQPRGTFTLSTTLRLGKQILESIEAIHSVGFLHRDIKPSNFAMGRLPSTYRKCYMLDFGLARQYTNTTGDVRPPRNVAGFRGTVRYASVNAHKNREMGRHDDLWSLFYMLVEFAVGQLPWRKIKDKEQVGMIKEKYEHRMLLKHMPSEFHLFLDHIASLDYFTKPDYQLIMSVFENSMKERGIAENEAFDWEKAGTDALLSTSTSTPPQQNTRQTAAMFGVVNVTPVPGDLLRENTEDVLQGEHLSDQENAPPILPGRPSEGLGPSPHLVPHPGGPEAEVWEETDVNRNKLRINIGKSPCVEEEQSRGMGVPSSPVRAPPDSPTTPVRSLRYRRVNSPESERLSTADGRVELPERRSRMDLPGSPSRQACSSQPAQMLSVDTGHADRQASGRMDVSASVEQEALSNAFRSVPLAEEEDFDSKEWVIIDKETELKDFPPGAEPSTSGTTDEEPEELRPLPEEGEERRRLGAEPTVRPRGRSMQALAEEDLQHLPPQPLPPQLSQXDGRSETSQPPTPGSPSHSPLHSGPRPRRRESDPTGPQRQAGVQWRDLGSLQPPPPRFKQFSCLSLPRSWDYRHAPPPHPANFVFLVETGFLHVEAGLELLTSGDLPASASQIAGITGVSHRAQPEVCEFNRKHTGQREQMVCAGSERAWSMRDLPGRPLEPYSESY

SEQ ID NO: 211 - DNA, 2670 bp, Homo Sapiens
  CDS (1)...(2670)
atgctggcggcgcggtgcattgtgggcagctccccgctctgccgctgccgccgccgtcgcccaaggaggatcggggccgggccgggccgggatgatccgggtcggaaggccgccgccgccggagggagcgggtcacccaacgccgcactgagccgcccccgccccgccccggccccgggggatgcgccgccccgagctgctgcctccgccgccgccgcagccgcagccgcagcgggcacagagcaggtagatggccccctcagggcaggcccggcggacacccctccctctggctggcggatgcagtgcctagcggccgcccttaaggacgaaaccaacatgagtgggggaggggagcaggccgacatcctgccggccaactacgtggtcaaggatcgctggaaggtgctgaaaaagatcgggggcgggggctttggtgagatctacgaggccatggacctgctgaccagggagaatgtggccctcaaggtggagtcagcccagcagcccaagcaggtcctcaagatggaggtggccgtgctcaagaagttgcaagggaaggaccatgtgtgcaggttcattggctgtggcaggaacgagaagtttaactatgtagtgatgcagctccagggccggaacctggccgacctgcgccgtagccagccgcgaggcaccttcacgctgagcaccacattgcggctgggcaagcagatcttggagtccatcgaggccatccactctgtgggcttcctgcaccgtgacatcaagccttcaaactttgccatgggcaggctgccctccacctacaggaagtgctatatgctggacttcgggctggcccggcagtacaccaacaccacgggggatgtgcggccccctcggaatgtggccgggtttcgaggaacggttcgctatgcctcagtcaatgcccacaagaaccgggagatgggccgccacgacgacctgtggtccctcttctacatgctggtggagtttgcagtgggccagctgccctggaggaagatcaaggacaaggaacaggtagggatgatcaaggagaagtatgagcaccggatgctgctgaagcacatgccgtcagagttccacctcttcctggaccacattgccagcctcgactacttcaccaagcccgactaccagttgatcatgtcagtgtttgagaacagcatgaaggagaggggcattgccgagaatgaggcctttgactgggagaaggcaggcaccgatgccctcctgtccacgagcacctctaccccgccccagcagaacacccggcagacggcagccatgtttggggtggtcaatgtgacgccagtgcctggggacctgctccgggagaacaccgaggatgtgctacagggagagcacctgagtgaccaggagaatgcacccccaattctgcccgggaggccctctgaggggctgggccccagtccccaccttgtcccccaccccgggggtcctgaggctgaagtctgggaggagacagatgtcaaccggaacaaactccggatcaacatcggcaaaagcccctgtgtggaggaggaacagagccgaggcatgggggtccccagctccccagtgcgtgcccccccagactcccccacaaccccagtccgttctctgcgctaccggagggtgaacagccctgagtcagaaaggctgtccacggcggacgggcgagtggagctacctgagaggaggtcacggatggatctgcctggctcgccctcgcgccaggcctgctcctctcagccagcccagatgctgtcagtggacacaggccacgctgaccgacaggccagtggccgcatggaygtgtcagcctctgtggagcaggaggccctgagcaacgccttccgctcggtgccgctggctgaggaggaggatttcgacagcaaagagtgggtcatcatcgacaaggagacggagctcaaggacttccctccaggggctgagcccagcacatcgggcaccacggatgaggagcccgaggagctgcggccactgcccgaggagggcgaagagcggcggcggctgggggcagagcccaccgtccggccccggggacgcagcatgcaggcgctggcggaggaggacctgcagcatttgccgccccagcccctgccaccccagctgagccaggscgatggccgttccgagacgtcacagccccccacgcctggcagcccttcccactcacccctgcactcgggaccccgccctcgacggagagagtcggaccccacaggcccacagagacaggctggagtgcaatggcgtgatctcggctcactgcaacctccacctcccaggttcaagcaattctcctgcctcagcctcccgagaagctgggattacaggcatgcaccaccaccacacccggctaattttgtatttttagtagagacggggtttctccatgttgaggctggtcttgagctcctgacctcaggtgatctgcctgcctcggcctcccaaattgctgggattacaggcgtgagccatcgcgcccagcctgaggtctgtgagtttaacagaaaacatacaggccagagagagcagatggtttgtgcaggatcagagagagcctggagcatgcgtgacctgcccgggcggccgctcgagccctatagtgagtcgtattag

SEQ ID NO: 212 - protein, 889 aa, Homo Sapiens
  VARIANT 723: Xaa = Any Amino Acid
MLAARCIVGSSPLCRCRRRRPRRIGAGPGRDDPGRKAAAAGGSGSPNAALSRPRPAPAPGDAPPRAAASAAAAAAAAAGTEQVDGPLRAGPADTPPSGWRMQCLAAALKDETNMSGGGEQADILPANYVVKDRWKVLKKIGGGGFGEIYEAMDLLTRENVALKVESAQQPKQVLKMEVAVLKKLQGKDHVCRFIGCGRNEKFNYVVMQLQGRNLADLRRSQPRGTFTLSTTLRLGKQILESIEAIHSVGFLHRDIKPSNFAMGRLPSTYRKCYMLDFGLARQYTNTTGDVRPPRNVAGFRGTVRYASVNAHKNREMGRHDDLWSLFYMLVEFAVGQLPWRKIKDKEQVGMIKEKYEHRMLLKHMPSEFHLFLDHIASLDYFTKPDYQLIMSVFENSMKERGIAENEAFDWEKAGTDALLSTSTSTPPQQNTRQTAAMFGVVNVTPVPGDLLRENTEDVLQGEHLSDQENAPPILPGRPSEGLGPSPHLVPHPGGPEAEVWEETDVNRNKLRINIGKSPCVEEEQSRGMGVPSSPVRAPPDSPTTPVRSLRYRRVNSPESERLSTADGRVELPERRSRMDLPGSPSRQACSSQPAQMLSVDTGHADRQASGRMDVSASVEQEALSNAFRSVPLAEEEDFDSKEWVIIDKETELKDFPPGAEPSTSGTTDEEPEELRPLPEEGEERRRLGAEPTVRPRGRSMQALAEEDLQHLPPQPLPPQLSQXDGRSETSQPPTPGSPSHSPLHSGPRPRRRESDPTGPQRQAGVQWRDLGSLQPPPPRFKQFSCLSLPRSWDYRHAPPPHPANFVFLVETGFLHVEAGLELLTSGDLPASASQIAGITGVSHRAQPEVCEFNRKHTGQREQMVCAGSERAWSMRDLPGRPLEPYSESY

SEQ ID NO: 213 - DNA, 2370 bp, Homo Sapiens
  CDS (1)...(2370)
atgcagtgcctagcggccgcccttaaggacgaaaccaacatgagtgggggaggggagcaggccgacatcctgccggccaactacgtggtcaaggatcgctggaaggtgctgaaaaagatcgggggcgggggctttggtgagatctacgaggccatggacctgctgaccagggagaatgtggccctcaaggtggagtcagcccagcagcccaagcaggtcctcaagatggaggtggccgtgctcaagaagttgcaagggaaggaccatgtgtgcaggttcattggctgtggcaggaacgagaagtttaactatgtagtgatgcagctccagggccggaacctggccgacctgcgccgtagccagccgcgaggcaccttcacgctgagcaccacattgcggctgggcaagcagatcttggagtccatcgaggccatccactctgtgggcttcctgcaccgtgacatcaagccttcaaactttgccatgggcaggctgccctccacctacaggaagtgctatatgctggacttcgggctggcccggcagtacaccaacaccacgggggatgtgcggccccctcggaatgtggccgggtttcgaggaacggttcgctatgcctcagtcaatgcccacaagaaccgggagatgggccgccacgacgacctgtggtccctcttctacatgctggtggagtttgcagtgggccagctgccctggaggaagatcaaggacaaggaacaggtagggatgatcaaggagaagtatgagcaccggatgctgctgaagcacatgccgtcagagttccacctcttcctggaccacattgccagcctcgactacttcaccaagcccgactaccagttgatcatgtcagtgtttgagaacagcatgaaggagaggggcattgccgagaatgaggcctttgactgggagaaggcaggcaccgatgccctcctgtccacgagcacctctaccccgccccagcagaacacccggcagacggcagccatgtttggggtggtcaatgtgacgccagtgcctggggacctgctccgggagaacaccgaggatgtgctacagggagagcacctgagtgaccaggagaatgcacccccaattctgcccgggaggccctctgaggggctgggccccagtccccaccttgtcccccaccccgggggtcctgaggctgaagtctgggaggagacagatgtcaaccggaacaaactccggatcaacatcggcaaaagcccctgtgtggaggaggaacagagccgaggcatgggggtccccagctccccagtgcgtgcccccccagactcccccacaaccccagtccgttctctgcgctaccggagggtgaacagccctgagtcagaaaggctgtccacggcggacgggcgagtggagctacctgagaggaggtcacggatggatctgcctggctcgccctcgcgccaggcctgctcctctcagccagcccagatgctgtcagtggacacaggccacgctgaccgacaggccagtggccgcatggaygtgtcagcctctgtggagcaggaggccctgagcaacgccttccgctcggtgccgctggctgaggaggaggatttcgacagcaaagagtgggtcatcatcgacaaggagacggagctcaaggacttccctccaggggctgagcccagcacatcgggcaccacggatgaggagcccgaggagctgcggccactgcccgaggagggcgaagagcggcggcggctgggggcagagcccaccgtccggccccggggacgcagcatgcaggcgctggcggaggaggacctgcagcatttgccgccccagcccctgccaccccagctgagccaggscgatggccgttccgagacgtcacagccccccacgcctggcagcccttcccactcacccctgcactcgggaccccgccctcgacggagagagtcggaccccacaggcccacagagacaggctggagtgcaatggcgtgatctcggctcactgcaacctccacctcccaggttcaagcaattctcctgcctcagcctcccgagaagctgggattacaggcatgcaccaccaccacacccggctaattttgtatttttagtagagacggggtttctccatgttgaggctggtcttgagctcctgacctcaggtgatctgcctgcctcggcctcccaaattgctgggattacaggcgtgagccatcgcgcccagcctgaggtctgtgagtttaacagaaaacatacaggccagagagagcagatggtttgtgcaggatcagagagagcctggagcatgcgtgacctgcccgggcggccgctcgagccctatagtgagtcgtattag

SEQ ID NO: 214 - protein, 789 aa, Homo Sapiens
  VARIANT 623: Xaa = Any Amino Acid
MQCLAAALKDETNMSGGGEQADILPANYVVKDRWKVLKKIGGGGFGEIYEAMDLLTRENVALKVESAQQPKQVLKMEVAVLKKLQGKDHVCRFIGCGRNEKFNYVVMQLQGRNLADLRRSQPRGTFTLSTTLRLGKQILESIEAIHSVGFLHRDIKPSNFAMGRLPSTYRKCYMLDFGLARQYTNTTGDVRPPRNVAGFRGTVRYASVNAHKNREMGRHDDLWSLFYMLVEFAVGQLPWRKIKDKEQVGMIKEKYEHRMLLKHMPSEFHLFLDHIASLDYFTKPDYQLIMSVFENSMKERGIAENEAFDWEKAGTDALLSTSTSTPPQQNTRQTAAMFGVVNVTPVPGDLLRENTEDVLQGEHLSDQENAPPILPGRPSEGLGPSPHLVPHPGGPEAEVWEETDVNRNKLRINIGKSPCVEEEQSRGMGVPSSPVRAPPDSPTTPVRSLRYRRVNSPESERLSTADGRVELPERRSRMDLPGSPSRQACSSQPAQMLSVDTGHADRQASGRMDVSASVEQEALSNAFRSVPLAEEEDFDSKEWVIIDKETELKDFPPGAEPSTSGTTDEEPEELRPLPEEGEERRRLGAEPTVRPRGRSMQALAEEDLQHLPPQPLPPQLSQXDGRSETSQPPTPGSPSHSPLHSGPRPRRRESDPTGPQRQAGVQWRDLGSLQPPPPRFKQFSCLSLPRSWDYRHAPPPHPANFVFLVETGFLHVEAGLELLTSGDLPASASQIAGITGVSHRAQPEVCEFNRKHTGQREQMVCAGSERAWSMRDLPGRPLEPYSESY

SEQ ID NO: 215 - DNA, 2331 bp, Homo Sapiens
  CDS (1)...(2331)
atgagtgggggaggggagcaggccgacatcctgccggccaactacgtggtcaaggatcgctggaaggtgctgaaaaagatcgggggcgggggctttggtgagatctacgaggccatggacctgctgaccagggagaatgtggccctcaaggtggagtcagcccagcagcccaagcaggtcctcaagatggaggtggccgtgctcaagaagttgcaagggaaggaccatgtgtgcaggttcattggctgtggcaggaacgagaagtttaactatgtagtgatgcagctccagggccggaacctggccgacctgcgccgtagccagccgcgaggcaccttcacgctgagcaccacattgcggctgggcaagcagatcttggagtccatcgaggccatccactctgtgggcttcctgcaccgtgacatcaagccttcaaactttgccatgggcaggctgccctccacctacaggaagtgctatatgctggacttcgggctggcccggcagtacaccaacaccacgggggatgtgcggccccctcggaatgtggccgggtttcgaggaacggttcgctatgcctcagtcaatgcccacaagaaccgggagatgggccgccacgacgacctgtggtccctcttctacatgctggtggagtttgcagtgggccagctgccctggaggaagatcaaggacaaggaacaggtagggatgatcaaggagaagtatgagcaccggatgctgctgaagcacatgccgtcagagttccacctcttcctggaccacattgccagcctcgactacttcaccaagcccgactaccagttgatcatgtcagtgtttgagaacagcatgaaggagaggggcattgccgagaatgaggcctttgactgggagaaggcaggcaccgatgccctcctgtccacgagcacctctaccccgccccagcagaacacccggcagacggcagccatgtttggggtggtcaatgtgacgccagtgcctggggacctgctccgggagaacaccgaggatgtgctacagggagagcacctgagtgaccaggagaatgcacccccaattctgcccgggaggccctctgaggggctgggccccagtccccaccttgtcccccaccccgggggtcctgaggctgaagtctgggaggagacagatgtcaaccggaacaaactccggatcaacatcggcaaaagcccctgtgtggaggaggaacagagccgaggcatgggggtccccagctccccagtgcgtgcccccccagactcccccacaaccccagtccgttctctgcgctaccggagggtgaacagccctgagtcagaaaggctgtccacggcggacgggcgagtggagctacctgagaggaggtcacggatggatctgcctggctcgccctcgcgccaggcctgctcctctcagccagcccagatgctgtcagtggacacaggccacgctgaccgacaggccagtggccgcatggaygtgtcagcctctgtggagcaggaggccctgagcaacgccttccgctcggtgccgctggctgaggaggaggatttcgacagcaaagagtgggtcatcatcgacaaggagacggagctcaaggacttccctccaggggctgagcccagcacatcgggcaccacggatgaggagcccgaggagctgcggccactgcccgaggagggcgaagagcggcggcggctgggggcagagcccaccgtccggccccggggacgcagcatgcaggcgctggcggaggaggacctgcagcatttgccgccccagcccctgccaccccagctgagccaggscgatggccgttccgagacgtcacagccccccacgcctggcagcccttcccactcacccctgcactcgggaccccgccctcgacggagagagtcggaccccacaggcccacagagacaggctggagtgcaatggcgtgatctcggctcactgcaacctccacctcccaggttcaagcaattctcctgcctcagcctcccgagaagctgggattacaggcatgcaccaccaccacacccggctaattttgtatttttagtagagacggggtttctccatgttgaggctggtcttgagctcctgacctcaggtgatctgcctgcctcggcctcccaaattgctgggattacaggcgtgagccatcgcgcccagcctgaggtctgtgagtttaacagaaaacatacaggccagagagagcagatggtttgtgcaggatcagagagagcctggagcatgcgtgacctgcccgggcggccgctcgagccctatagtgagtcgtattag

SEQ ID NO: 216 - protein, 776 aa, Homo Sapiens
  VARIANT 610: Xaa = Any Amino Acid
MSGGGEQADILPANYVVKDRWKVLKKIGGGGFGEIYEAMDLLTRENVALKVESAQQPKQVLKMEVAVLKKLQGKDHVCRFIGCGRNEKFNYVVMQLQGRNLADLRRSQPRGTFTLSTTLRLGKQILESIEAIHSVGFLHRDIKPSNFAMGRLPSTYRKCYMLDFGLARQYTNTTGDVRPPRNVAGFRGTVRYASVNAHKNREMGRHDDLWSLFYMLVEFAVGQLPWRKIKDKEQVGMIKEKYEHRMLLKHMPSEFHLFLDHIASLDYFTKPDYQLIMSVFENSMKERGIAENEAFDWEKAGTDALLSTSTSTPPQQNTRQTAAMFGVVNVTPVPGDLLRENTEDVLQGEHLSDQENAPPILPGRPSEGLGPSPHLVPHPGGPEAEVWEETDVNRNKLRINIGKSPCVEEEQSRGMGVPSSPVRAPPDSPTTPVRSLRYRRVNSPESERLSTADGRVELPERRSRMDLPGSPSRQACSSQPAQMLSVDTGHADRQASGRMDVSASVEQEALSNAFRSVPLAEEEDFDSKEWVIIDKETELKDFPPGAEPSTSGTTDEEPEELRPLPEEGEERRRLGAEPTVRPRGRSMQALAEEDLQHLPPQPLPPQLSQXDGRSETSQPPTPGSPSHSPLHSGPRPRRRESDPTGPQRQAGVQWRDLGSLQPPPPRFKQFSCLSLPRSWDYRHAPPPHPANFVFLVETGFLHVEAGLELLTSGDLPASASQIAGITGVSHRAQPEVCEFNRKHTGQREQMVCAGSERAWSMRDLPGRPLEPYSESY

SEQ ID NO: 217 - DNA, 2949 bp, Homo Sapiens
  CDS (1)...(2949)
atgtcagggctggtgctgatgctggcggcgcggtgcattgtgggcagctccccgctctgccgctgccgccgccgtcgcccaaggaggatcggggccgggccgggccgggatgatccgggtcggaaggccgccgccgccggagggagcgggtcacccaacgccgcactgagccgcccccgccccgccccggccccgggggatgcgccgccccgagctgctgcctccgccgccgccgcagccgcagccgcagcgggcacagagcaggtagatggccccctcagggcaggcccggcggacacccctccctctggctggcggatgcagtgcctagcggccgcccttaaggacgaaaccaacatgagtgggggaggggagcaggccgacatcctgccggccaactacgtggtcaaggatcgctggaaggtgctgaaaaagatcgggggcgggggctttggtgagatctacgaggccatggacctgctgaccagggagaatgtggccctcaaggtggagtcagcccagcagcccaagcaggtcctcaagatggaggtggccgtgctcaagaagttgcaagggaaggaccatgtgtgcaggttcattggctgtggcaggaacgagaagtttaactatgtagtgatgcagctccagggccggaacctggccgacctgcgccgtagccagccgcgaggcaccttcacgctgagcaccacattgcggctgggcaagcagatcttggagtccatcgaggccatccactctgtgggcttcctgcaccgtgacatcaagccttcaaactttgccatgggcaggctgccctccacctacaggaagtgctatatgctggacttcgggctggcccggcagtacaccaacaccacgggggatgtgcggccccctcggaatgtggccgggtttcgaggaacggttcgctatgcctcagtcaatgcccacaagaaccgggagatgggccgccacgacgacctgtggtccctcttctacatgctggtggagtttgcagtgggccagctgccctggaggaagatcaaggacaaggaacaggtagggatgatcaaggagaagtatgagcaccggatgctgctgaagcacatgccgtcagagttccacctcttcctggaccacattgccagcctcgactacttcaccaagcccgactaccagttgatcatgtcagtgtttgagaacagcatgaaggagaggggcattgccgagaatgaggcctttgactgggagaaggcaggcaccgatgccctcctgtccacgagcacctctaccccgccccagcagaacacccggcagacggcagccatgtttggggtggtcaatgtgacgccagtgcctggggacctgctccgggagaacaccgaggatgtgctacagggagagcacctgagtgaccaggagaatgcacccccaattctgcccgggaggccctctgaggggctgggccccagtccccaccttgtcccccaccccgggggtcctgaggctgaagtctgggaggagacagatgtcaaccggaacaaactccggatcaacatcggcaaagtaactgccgccagggcgaagggcgtgggtggccttttctctcacccccgattcccagccttgtgcccctgccctgttcctcctaagcaccctgtccccggccatctgcctgcttgccctgcctctgtttcccggtccctccccgcactagcctcgctgtgtcttccatcatcatcatcctctgtctccttcaccctgaggagaccatccgcccacagccgcctcatcagccccagctcatggcactcccctctcctgcagagcccctgtgtggaggaggaacagagccgaggcatgggggtccccagctccccagtgcgtgcccccccagactcccccacaaccccagtccgttctctgcgctaccggagggtgaacagccctgagtcagaaaggctgtccacggcggacgggcgagtggagctacctgagaggaggtcacggatggatctgcctggctcgccctcgcgccaggcctgctcctctcagccagcccagatgctgtcagtggacacaggccacgctgaccgacaggccagtggccgcatggaygtgtcagcctctgtggagcaggaggccctgagcaacgccttccgctcggtgccgctggctgaggaggaggatttcgacagcaaagagtgggtcatcatcgacaaggagacggagctcaaggacttccctccaggggctgagcccagcacatcgggcaccacggatgaggagcccgaggagctgcggccactgcccgaggagggcgaagagcggcggcggctgggggcagagcccaccgtccggccccggggacgcagcatgcaggcgctggcggaggaggacctgcagcatttgccgccccagcccctgccaccccagctgagccaggscgatggccgttccgagacgtcacagccccccacgcctggcagcccttcccactcacccctgcactcgggaccccgccctcgacggagagagtcggaccccacaggcccacagagacaggctggagtgcaatggcgtgatctcggctcactgcaacctccacctcccaggttcaagcaattctcctgcctcagcctcccgagaagctgggattacaggcatgcaccaccaccacacccggctaattttgtatttttagtagagacggggtttctccatgttgaggctggtcttgagctcctgacctcaggtgatctgcctgcctcggcctcccaaattgctgggattacaggcgtgagccatcgcgcccagcctgaggtctgtgagtttaacagaaaacatacaggccagagagagcagatggtttgtgcaggatcagagagagcctggagcatgcgtgacctgcccgggcggccgctcgagccctatagtgagtcgtattag

SEQ ID NO: 218 - protein, 982 aa, Homo Sapiens
  VARIANT 816: Xaa = Any Amino Acid
MSGLVLMLAARCIVGSSPLCRCRRRRPRRIGAGPGRDDPGRKAAAAGGSGSPNAALSRPRPAPAPGDAPPRAAASAAAAAAAAAGTEQVDGPLRAGPADTPPSGWRMQCLAAALKDETNMSGGGEQADILPANYVVKDRWKVLKKIGGGGFGEIYEAMDLLTRENVALKVESAQQPKQVLKMEVAVLKKLQGKDHVCRFIGCGRNEKFNYVVMQLQGRNLADLRRSQPRGTFTLSTTLRLGKQILESIEAIHSVGFLHRDIKPSNFAMGRLPSTYRKCYMLDFGLARQYTNTTGDVRPPRNVAGFRGTVRYASVNAHKNREMGRHDDLWSLFYMLVEFAVGQLPWRKIKDKEQVGMIKEKYEHRMLLKHMPSEFHLFLDHIASLDYFTKPDYQLIMSVFENSMKERGIAENEAFDWEKAGTDALLSTSTSTPPQQNTRQTAAMFGVVNVTPVPGDLLRENTEDVLQGEHLSDQENAPPILPGRPSEGLGPSPHLVPHPGGPEAEVWEETDVNRNKLRINIGKVTAARAKGVGGLFSHPRFPALCPCPVPPKHPVPGHLPACPASVSRSLPALASLCLPSSSSSVSFTLRRPSAHSRLISPSSWHSPLLQSPCVEEEQSRGMGVPSSPVRAPPDSPTTPVRSLRYRRVNSPESERLSTADGRVELPERRSRMDLPGSPSRQACSSQPAQMLSVDTGHADRQASGRMDVSASVEQEALSNAFRSVPLAEEEDFDSKEWVIIDKETELKDFPPGAEPSTSGTTDEEPEELRPLPEEGEERRRLGAEPTVRPRGRSMQALAEEDLQHLPPQPLPPQLSQXDGRSETSQPPTPGSPSHSPLHSGPRPRRRESDPTGPQRQAGVQWRDLGSLQPPPPRFKQFSCLSLPRSWDYRHAPPPHPANFVFLVETGFLHVEAGLELLTSGDLPASASQIAGITGVSHRAQPEVCEFNRKHTGQREQMVCAGSERAWSMRDLPGRPLEPYSESY

SEQ ID NO: 219 - DNA, 2931 bp, Homo Sapiens
  CDS (1)...(2931)
atgctggcggcgcggtgcattgtgggcagctccccgctctgccgctgccgccgccgtcgcccaaggaggatcggggccgggccgggccgggatgatccgggtcggaaggccgccgccgccggagggagcgggtcacccaacgccgcactgagccgcccccgccccgccccggccccgggggatgcgccgccccgagctgctgcctccgccgccgccgcagccgcagccgcagcgggcacagagcaggtagatggccccctcagggcaggcccggcggacacccctccctctggctggcggatgcagtgcctagcggccgcccttaaggacgaaaccaacatgagtgggggaggggagcaggccgacatcctgccggccaactacgtggtcaaggatcgctggaaggtgctgaaaaagatcgggggcgggggctttggtgagatctacgaggccatggacctgctgaccagggagaatgtggccctcaaggtggagtcagcccagcagcccaagcaggtcctcaagatggaggtggccgtgctcaagaagttgcaagggaaggaccatgtgtgcaggttcattggctgtggcaggaacgagaagtttaactatgtagtgatgcagctccagggccggaacctggccgacctgcgccgtagccagccgcgaggcaccttcacgctgagcaccacattgcggctgggcaagcagatcttggagtccatcgaggccatccactctgtgggcttcctgcaccgtgacatcaagccttcaaactttgccatgggcaggctgccctccacctacaggaagtgctatatgctggacttcgggctggcccggcagtacaccaacaccacgggggatgtgcggccccctcggaatgtggccgggtttcgaggaacggttcgctatgcctcagtcaatgcccacaagaaccgggagatgggccgccacgacgacctgtggtccctcttctacatgctggtggagtttgcagtgggccagctgccctggaggaagatcaaggacaaggaacaggtagggatgatcaaggagaagtatgagcaccggatgctgctgaagcacatgccgtcagagttccacctcttcctggaccacattgccagcctcgactacttcaccaagcccgactaccagttgatcatgtcagtgtttgagaacagcatgaaggagaggggcattgccgagaatgaggcctttgactgggagaaggcaggcaccgatgccctcctgtccacgagcacctctaccccgccccagcagaacacccggcagacggcagccatgtttggggtggtcaatgtgacgccagtgcctggggacctgctccgggagaacaccgaggatgtgctacagggagagcacctgagtgaccaggagaatgcacccccaattctgcccgggaggccctctgaggggctgggccccagtccccaccttgtcccccaccccgggggtcctgaggctgaagtctgggaggagacagatgtcaaccggaacaaactccggatcaacatcggcaaagtaactgccgccagggcgaagggcgtgggtggccttttctctcacccccgattcccagccttgtgcccctgccctgttcctcctaagcaccctgtccccggccatctgcctgcttgccctgcctctgtttcccggtccctccccgcactagcctcgctgtgtcttccatcatcatcatcctctgtctccttcaccctgaggagaccatccgcccacagccgcctcatcagccccagctcatggcactcccctctcctgcagagcccctgtgtggaggaggaacagagccgaggcatgggggtccccagctccccagtgcgtgcccccccagactcccccacaaccccagtccgttctctgcgctaccggagggtgaacagccctgagtcagaaaggctgtccacggcggacgggcgagtggagctacctgagaggaggtcacggatggatctgcctggctcgccctcgcgccaggcctgctcctctcagccagcccagatgctgtcagtggacacaggccacgctgaccgacaggccagtggccgcatggaygtgtcagcctctgtggagcaggaggccctgagcaacgccttccgctcggtgccgctggctgaggaggaggatttcgacagcaaagagtgggtcatcatcgacaaggagacggagctcaaggacttccctccaggggctgagcccagcacatcgggcaccacggatgaggagcccgaggagctgcggccactgcccgaggagggcgaagagcggcggcggctgggggcagagcccaccgtccggccccggggacgcagcatgcaggcgctggcggaggaggacctgcagcatttgccgccccagcccctgccaccccagctgagccaggscgatggccgttccgagacgtcacagccccccacgcctggcagcccttcccactcacccctgcactcgggaccccgccctcgacggagagagtcggaccccacaggcccacagagacaggctggagtgcaatggcgtgatctcggctcactgcaacctccacctcccaggttcaagcaattctcctgcctcagcctcccgagaagctgggattacaggcatgcaccaccaccacacccggctaattttgtatttttagtagagacggggtttctccatgttgaggctggtcttgagctcctgacctcaggtgatctgcctgcctcggcctcccaaattgctgggattacaggcgtgagccatcgcgcccagcctgaggtctgtgagtttaacagaaaacatacaggccagagagagcagatggtttgtgcaggatcagagagagcctggagcatgcgtgacctgcccgggcggccgctcgagccctatagtgagtcgtattag

SEQ ID NO: 220 - protein, 976 aa, Homo Sapiens
  VARIANT 810: Xaa = Any Amino Acid
MLAARCIVGSSPLCRCRRRRPRRIGAGPGRDDPGRKAAAAGGSGSPNAALSRPRPAPAPGDAPPRAAASAAAAAAAAAGTEQVDGPLRAGPADTPPSGWRMQCLAAALKDETNMSGGGEQADILPANYVVKDRWKVLKKIGGGGFGEIYEAMDLLTRENVALKVESAQQPKQVLKMEVAVLKKLQGKDHVCRFIGCGRNEKFNYVVMQLQGRNLADLRRSQPRGTFTLSTTLRLGKQILESIEAIHSVGFLHRDIKPSNFAMGRLPSTYRKCYMLDFGLARQYTNTTGDVRPPRNVAGFRGTVRYASVNAHKNREMGRHDDLWSLFYMLVEFAVGQLPWRKIKDKEQVGMIKEKYEHRMLLKHMPSEFHLFLDHIASLDYFTKPDYQLIMSVFENSMKERGIAENEAFDWEKAGTDALLSTSTSTPPQQNTRQTAAMFGVVNVTPVPGDLLRENTEDVLQGEHLSDQENAPPILPGRPSEGLGPSPHLVPHPGGPEAEVWEETDVNRNKLRINIGKVTAARAKGVGGLFSHPRFPALCPCPVPPKHPVPGHLPACPASVSRSLPALASLCLPSSSSSVSFTLRRPSAHSRLISPSSWHSPLLQSPCVEEEQSRGMGVPSSPVRAPPDSPTTPVRSLRYRRVNSPESERLSTADGRVELPERRSRMDLPGSPSRQACSSQPAQMLSVDTGHADRQASGRMDVSASVEQEALSNAFRSVPLAEEEDFDSKEWVIIDKETELKDFPPGAEPSTSGTTDEEPEELRPLPEEGEERRRLGAEPTVRPRGRSMQALAEEDLQHLPPQPLPPQLSQXDGRSETSQPPTPGSPSHSPLHSGPRPRRRESDPTGPQRQAGVQWRDLGSLQPPPPRFKQFSCLSLPRSWDYRHAPPPHPANFVFLVETGFLHVEAGLELLTSGDLPASASQIAGITGVSHRAQPEVCEFNRKHTGQREQMVCAGSERAWSMRDLPGRPLEPYSESY

SEQ ID NO: 221 - DNA, 2631 bp, Homo Sapiens
  CDS (1)...(2631)
atgcagtgcctagcggccgcccttaaggacgaaaccaacatgagtgggggaggggagcaggccgacatcctgccggccaactacgtggtcaaggatcgctggaaggtgctgaaaaagatcgggggcgggggctttggtgagatctacgaggccatggacctgctgaccagggagaatgtggccctcaaggtggagtcagcccagcagcccaagcaggtcctcaagatggaggtggccgtgctcaagaagttgcaagggaaggaccatgtgtgcaggttcattggctgtggcaggaacgagaagtttaactatgtagtgatgcagctccagggccggaacctggccgacctgcgccgtagccagccgcgaggcaccttcacgctgagcaccacattgcggctgggcaagcagatcttggagtccatcgaggccatccactctgtgggcttcctgcaccgtgacatcaagccttcaaactttgccatgggcaggctgccctccacctacaggaagtgctatatgctggacttcgggctggcccggcagtacaccaacaccacgggggatgtgcggccccctcggaatgtggccgggtttcgaggaacggttcgctatgcctcagtcaatgcccacaagaaccgggagatgggccgccacgacgacctgtggtccctcttctacatgctggtggagtttgcagtgggccagctgccctggaggaagatcaaggacaaggaacaggtagggatgatcaaggagaagtatgagcaccggatgctgctgaagcacatgccgtcagagttccacctcttcctggaccacattgccagcctcgactacttcaccaagcccgactaccagttgatcatgtcagtgtttgagaacagcatgaaggagaggggcattgccgagaatgaggcctttgactgggagaaggcaggcaccgatgccctcctgtccacgagcacctctaccccgccccagcagaacacccggcagacggcagccatgtttggggtggtcaatgtgacgccagtgcctggggacctgctccgggagaacaccgaggatgtgctacagggagagcacctgagtgaccaggagaatgcacccccaattctgcccgggaggccctctgaggggctgggccccagtccccaccttgtcccccaccccgggggtcctgaggctgaagtctgggaggagacagatgtcaaccggaacaaactccggatcaacatcggcaaagtaactgccgccagggcgaagggcgtgggtggccttttctctcacccccgattcccagccttgtgcccctgccctgttcctcctaagcaccctgtccccggccatctgcctgcttgccctgcctctgtttcccggtccctccccgcactagcctcgctgtgtcttccatcatcatcatcctctgtctccttcaccctgaggagaccatccgcccacagccgcctcatcagccccagctcatggcactcccctctcctgcagagcccctgtgtggaggaggaacagagccgaggcatgggggtccccagctccccagtgcgtgcccccccagactcccccacaaccccagtccgttctctgcgctaccggagggtgaacagccctgagtcagaaaggctgtccacggcggacgggcgagtggagctacctgagaggaggtcacggatggatctgcctggctcgccctcgcgccaggcctgctcctctcagccagcccagatgctgtcagtggacacaggccacgctgaccgacaggccagtggccgcatggaygtgtcagcctctgtggagcaggaggccctgagcaacgccttccgctcggtgccgctggctgaggaggaggatttcgacagcaaagagtgggtcatcatcgacaaggagacggagctcaaggacttccctccaggggctgagcccagcacatcgggcaccacggatgaggagcccgaggagctgcggccactgcccgaggagggcgaagagcggcggcggctgggggcagagcccaccgtccggccccggggacgcagcatgcaggcgctggcggaggaggacctgcagcatttgccgccccagcccctgccaccccagctgagccaggscgatggccgttccgagacgtcacagccccccacgcctggcagcccttcccactcacccctgcactcgggaccccgccctcgacggagagagtcggaccccacaggcccacagagacaggctggagtgcaatggcgtgatctcggctcactgcaacctccacctcccaggttcaagcaattctcctgcctcagcctcccgagaagctgggattacaggcatgcaccaccaccacacccggctaattttgtatttttagtagagacggggtttctccatgttgaggctggtcttgagctcctgacctcaggtgatctgcctgcctcggcctcccaaattgctgggattacaggcgtgagccatcgcgcccagcctgaggtctgtgagtttaacagaaaacatacaggccagagagagcagatggtttgtgcaggatcagagagagcctggagcatgcgtgacctgcccgggcggccgctcgagccctatagtgagtcgtattag

SEQ ID NO: 222 - protein, 876 aa, Homo Sapiens
  VARIANT 710: Xaa = Any Amino Acid
MQCLAAALKDETNMSGGGEQADILPANYVVKDRWKVLKKIGGGGFGEIYEAMDLLTRENVALKVESAQQPKQVLKMEVAVLKKLQGKDHVCRFIGCGRNEKFNYVVMQLQGRNLADLRRSQPRGTFTLSTTLRLGKQILESIEAIHSVGFLHRDIKPSNFAMGRLPSTYRKCYMLDFGLARQYTNTTGDVRPPRNVAGFRGTVRYASVNAHKNREMGRHDDLWSLFYMLVEFAVGQLPWRKIKDKEQVGMIKEKYEHRMLLKHMPSEFHLFLDHIASLDYFTKPDYQLIMSVFENSMKERGIAENEAFDWEKAGTDALLSTSTSTPPQQNTRQTAAMFGVVNVTPVPGDLLRENTEDVLQGEHLSDQENAPPILPGRPSEGLGPSPHLVPHPGGPEAEVWEETDVNRNKLRINIGKVTAARAKGVGGLFSHPRFPALCPCPVPPKHPVPGHLPACPASVSRSLPALASLCLPSSSSSVSFTLRRPSAHSRLISPSSWHSPLLQSPCVEEEQSRGMGVPSSPVRAPPDSPTTPVRSLRYRRVNSPESERLSTADGRVELPERRSRMDLPGSPSRQACSSQPAQMLSVDTGHADRQASGRMDVSASVEQEALSNAFRSVPLAEEEDFDSKEWVIIDKETELKDFPPGAEPSTSGTTDEEPEELRPLPEEGEERRRLGAEPTVRPRGRSMQALAEEDLQHLPPQPLPPQLSQXDGRSETSQPPTPGSPSHSPLHSGPRPRRRESDPTGPQRQAGVQWRDLGSLQPPPPRFKQFSCLSLPRSWDYRHAPPPHPANFVFLVETGFLHVEAGLELLTSGDLPASASQIAGITGVSHRAQPEVCEFNRKHTGQREQMVCAGSERAWSMRDLPGRPLEPYSESY

SEQ ID NO: 223 - DNA, 2592 bp, Homo Sapiens
  CDS (1)...(2592)
atgagtgggggaggggagcaggccgacatcctgccggccaactacgtggtcaaggatcgctggaaggtgctgaaaaagatcgggggcgggggctttggtgagatctacgaggccatggacctgctgaccagggagaatgtggccctcaaggtggagtcagcccagcagcccaagcaggtcctcaagatggaggtggccgtgctcaagaagttgcaagggaaggaccatgtgtgcaggttcattggctgtggcaggaacgagaagtttaactatgtagtgatgcagctccagggccggaacctggccgacctgcgccgtagccagccgcgaggcaccttcacgctgagcaccacattgcggctgggcaagcagatcttggagtccatcgaggccatccactctgtgggcttcctgcaccgtgacatcaagccttcaaactttgccatgggcaggctgccctccacctacaggaagtgctatatgctggacttcgggctggcccggcagtacaccaacaccacgggggatgtgcggccccctcggaatgtggccgggtttcgaggaacggttcgctatgcctcagtcaatgcccacaagaaccgggagatgggccgccacgacgacctgtggtccctcttctacatgctggtggagtttgcagtgggccagctgccctggaggaagatcaaggacaaggaacaggtagggatgatcaaggagaagtatgagcaccggatgctgctgaagcacatgccgtcagagttccacctcttcctggaccacattgccagcctcgactacttcaccaagcccgactaccagttgatcatgtcagtgtttgagaacagcatgaaggagaggggcattgccgagaatgaggcctttgactgggagaaggcaggcaccgatgccctcctgtccacgagcacctctaccccgccccagcagaacacccggcagacggcagccatgtttggggtggtcaatgtgacgccagtgcctggggacctgctccgggagaacaccgaggatgtgctacagggagagcacctgagtgaccaggagaatgcacccccaattctgcccgggaggccctctgaggggctgggccccagtccccaccttgtcccccaccccgggggtcctgaggctgaagtctgggaggagacagatgtcaaccggaacaaactccggatcaacatcggcaaagtaactgccgccagggcgaagggcgtgggtggccttttctctcacccccgattcccagccttgtgcccctgccctgttcctcctaagcaccctgtccccggccatctgcctgcttgccctgcctctgtttcccggtccctccccgcactagcctcgctgtgtcttccatcatcatcatcctctgtctccttcaccctgaggagaccatccgcccacagccgcctcatcagccccagctcatggcactcccctctcctgcagagcccctgtgtggaggaggaacagagccgaggcatgggggtccccagctccccagtgcgtgcccccccagactcccccacaaccccagtccgttctctgcgctaccggagggtgaacagccctgagtcagaaaggctgtccacggcggacgggcgagtggagctacctgagaggaggtcacggatggatctgcctggctcgccctcgcgccaggcctgctcctctcagccagcccagatgctgtcagtggacacaggccacgctgaccgacaggccagtggccgcatggaygtgtcagcctctgtggagcaggaggccctgagcaacgccttccgctcggtgccgctggctgaggaggaggatttcgacagcaaagagtgggtcatcatcgacaaggagacggagctcaaggacttccctccaggggctgagcccagcacatcgggcaccacggatgaggagcccgaggagctgcggccactgcccgaggagggcgaagagcggcggcggctgggggcagagcccaccgtccggccccggggacgcagcatgcaggcgctggcggaggaggacctgcagcatttgccgccccagcccctgccaccccagctgagccaggscgatggccgttccgagacgtcacagccccccacgcctggcagcccttcccactcacccctgcactcgggaccccgccctcgacggagagagtcggaccccacaggcccacagagacaggctggagtgcaatggcgtgatctcggctcactgcaacctccacctcccaggttcaagcaattctcctgcctcagcctcccgagaagctgggattacaggcatgcaccaccaccacacccggctaattttgtatttttagtagagacggggtttctccatgttgaggctggtcttgagctcctgacctcaggtgatctgcctgcctcggcctcccaaattgctgggattacaggcgtgagccatcgcgcccagcctgaggtctgtgagtttaacagaaaacatacaggccagagagagcagatggtttgtgcaggatcagagagagcctggagcatgcgtgacctgcccgggcggccgctcgagccctatagtgagtcgtattag

SEQ ID NO: 224 - protein, 863 aa, Homo Sapiens
  VARIANT 697: Xaa = Any Amino Acid
MSGGGEQADILPANYVVKDRWKVLKKIGGGGFGEIYEAMDLLTRENVALKVESAQQPKQVLKMEVAVLKKLQGKDHVCRFIGCGRNEKFNYVVMQLQGRNLADLRRSQPRGTFTLSTTLRLGKQILESIEAIHSVGFLHRDIKPSNFAMGRLPSTYRKCYMLDFGLARQYTNTTGDVRPPRNVAGFRGTVRYASVNAHKNREMGRHDDLWSLFYMLVEFAVGQLPWRKIKDKEQVGMIKEKYEHRMLLKHMPSEFHLFLDHIASLDYFTKPDYQLIMSVFENSMKERGIAENEAFDWEKAGTDALLSTSTSTPPQQNTRQTAAMFGVVNVTPVPGDLLRENTEDVLQGEHLSDQENAPPILPGRPSEGLGPSPHLVPHPGGPEAEVWEETDVNRNKLRINIGKVTAARAKGVGGLFSHPRFPALCPCPVPPKHPVPGHLPACPASVSRSLPALASLCLPSSSSSVSFTLRRPSAHSRLISPSSWHSPLLQSPCVEEEQSRGMGVPSSPVRAPPDSPTTPVRSLRYRRVNSPESERLSTADGRVELPERRSRMDLPGSPSRQACSSQPAQMLSVDTGHADRQASGRMDVSASVEQEALSNAFRSVPLAEEEDFDSKEWVIIDKETELKDFPPGAEPSTSGTTDEEPEELRPLPEEGEERRRLGAEPTVRPRGRSMQALAEEDLQHLPPQPLPPQLSQXDGRSETSQPPTPGSPSHSPLHSGPRPRRRESDPTGPQRQAGVQWRDLGSLQPPPPRFKQFSCLSLPRSWDYRHAPPPHPANFVFLVETGFLHVEAGLELLTSGDLPASASQIAGITGVSHRAQPEVCEFNRKHTGQREQMVCAGSERAWSMRDLPGRPLEPYSESY

SEQ ID NO: 225 - DNA, 2874 bp, Homo Sapiens
  CDS (1)...(2874)
atgtcagggctggtgctgatgctggcggcgcggtgcattgtgggcagctccccgctctgccgctgccgccgccgtcgcccaaggaggatcggggccgggccgggccgggatgatccgggtcggaaggccgccgccgccggagggagcgggtcacccaacgccgcactgagccgcccccgccccgccccggccccgggggatgcgccgccccgagctgctgcctccgccgccgccgcagccgcagccgcagcgggcacagagcaggtagatggccccctcagggcaggcccggcggacacccctccctctggctggcggatgcagtgcctagcggccgcccttaaggacgaaaccaacatgagtgggggaggggagcaggccgacatcctgccggccaactacgtggtcaaggatcgctggaaggtgctgaaaaagatcgggggcgggggctttggtgagatctacgaggccatggacctgctgaccagggagaatgtggccctcaaggtggagtcagcccagcagcccaagcaggtcctcaagatggaggtggccgtgctcaagaagttgcaagggaaggaccatgtgtgcaggttcattggctgtggcaggaacgagaagtttaactatgtagtgatgcagctccagggccggaacctggccgacctgcgccgtagccagccgcgaggcaccttcacgctgagcaccacattgcggctgggcaagcagatcttggagtccatcgaggccatccactctgtgggcttcctgcaccgtgacatcaagccttcaaactttgccatgggcaggctgccctccacctacaggaagtgctatatgctggacttcgggctggcccggcagtacaccaacaccacgggggatgtgcggccccctcggaatgtggccgggtttcgaggaacggttcgctatgcctcagtcaatgcccacaagaaccgggagatgggccgccacgacgacctgtggtccctcttctacatgctggtggagtttgcagtgggccagctgccctggaggaagatcaaggacaaggaacaggtagggatgatcaaggagaagtatgagcaccggatgctgctgaagcacatgccgtcagagttccacctcttcctggaccacattgccagcctcgactacttcaccaagcccgactaccagttgatcatgtcagtgtttgagaacagcatgaaggagaggggcattgccgagaatgaggcctttgactgggagaaggcaggcaccgatgccctcctgtccacgagcacctctaccccgccccagcagaacacccggcagacggcagccatgtttggggtggtcaatgtgacgccagtgcctggggacctgctccgggagaacaccgaggatgtgctacagggagagcacctgagtgaccaggagaatgcacccccaattctgcccgggaggccctctgaggggctgggccccagtccccaccttgtcccccaccccgggggtcctgaggctgaagtctgggaggagacagatgtcaaccggaacaaactccggatcaacatcggcaaagtaactgccgccagggcgaagggcgtgggtggccttttctctcacccccgattcccagccttgtgcccctgccctgttcctcctaagcaccctgtccccggccatctgcctgcttgccctgcctctgtttcccggtccctccccgcactagcctcgctgtgtcttccatcatcatcatcctctgtctccttcaccctgaggagaccatccgcccacagccgcctcatcagccccagctcatggcactcccctctcctgcagagcccctgtgtggaggaggaacagagccgaggcatgggggtccccagctccccagtgcgtgcccccccagactcccccacaaccccagtccgttctctgcgctaccggagggtgaacagccctgagtcagaaaggctgtccacggcggacgggcgagtggagctacctgagaggaggtcacggatggatctgcctggctcgccctcgcgccaggcctgctcctctcagccagcccagatgctgtcagtggacacaggccacgctgaccgacaggccagtggccgcatggaygtgtcagcctctgtggagcaggaggccctgagcaacgccttccgctcggtgccgctggctgaggaggaggatttcgacagcaaagagtgggtcatcatcgacaaggagacggagctcaaggacttccctccaggggctgagcccagcacatcgggcaccacggatgaggagcccgaggagctgcggccactgcccgaggagggcgaagagcggcggcggctgggggcagagcccaccgtccggccccggggacgcagcatgcaggcgctggcggaggaggacctgcagcatttgccgccccagcccctgccaccccagctgagccaggscgatggccgttccgagacgtcacagccccccacgcctggcagcccttcccactcacccctgcactcgggaccccgccctcgacggagagagtcggaccccacaggcccacagagacagttggaggaggacagactctcggggcactccctcccgcggtacagccccctgcgacgactggcgtcctccgtgttctcctcctccacgctggagacggagcattaccctcaccccggcggcggcggctcctcgggctcctccggttccctcattcagcgcagccgctcggctgagagcagccctgtgcgggcgccccaccggcgccacgcgcccctcgctgctggcaaccacagactcatgccctcggtgctccgcatctcgcggtcccagctgcagcaggtgtgggcccggttcacccacaagacctag

SEQ ID NO: 226 - protein, 957 aa, Homo Sapiens
  VARIANT 816: Xaa = Any Amino Acid
MSGLVLMLAARCIVGSSPLCRCRRRRPRRIGAGPGRDDPGRKAAAAGGSGSPNAALSRPRPAPAPGDAPPRAAASAAAAAAAAAGTEQVDGPLRAGPADTPPSGWRMQCLAAALKDETNMSGGGEQADILPANYVVKDRWKVLKKIGGGGFGEIYEAMDLLTRENVALKVESAQQPKQVLKMEVAVLKKLQGKDHVCRFIGCGRNEKFNYVVMQLQGRNLADLRRSQPRGTFTLSTTLRLGKQILESIEAIHSVGFLHRDIKPSNFAMGRLPSTYRKCYMLDFGLARQYTNTTGDVRPPRNVAGFRGTVRYASVNAHKNREMGRHDDLWSLFYMLVEFAVGQLPWRKIKDKEQVGMIKEKYEHRMLLKHMPSEFHLFLDHIASLDYFTKPDYQLIMSVFENSMKERGIAENEAFDWEKAGTDALLSTSTSTPPQQNTRQTAAMFGVVNVTPVPGDLLRENTEDVLQGEHLSDQENAPPILPGRPSEGLGPSPHLVPHPGGPEAEVWEETDVNRNKLRINIGKVTAARAKGVGGLFSHPRFPALCPCPVPPKHPVPGHLPACPASVSRSLPALASLCLPSSSSSVSFTLRRPSAHSRLISPSSWHSPLLQSPCVEEEQSRGMGVPSSPVRAPPDSPTTPVRSLRYRRVNSPESERLSTADGRVELPERRSRMDLPGSPSRQACSSQPAQMLSVDTGHADRQASGRMDVSASVEQEALSNAFRSVPLAEEEDFDSKEWVIIDKETELKDFPPGAEPSTSGTTDEEPEELRPLPEEGEERRRLGAEPTVRPRGRSMQALAEEDLQHLPPQPLPPQLSQXDGRSETSQPPTPGSPSHSPLHSGPRPRRRESDPTGPQRQLEEDRLSGHSLPRYSPLRRLASSVFSSSTLETEHYPHPGGGGSSGSSGSLIQRSRSAESSPVRAPHRRHAPLAAGNHRLMPSVLRISRSQLQQVWARFTHKT

SEQ ID NO: 227 - DNA, 2856 bp, Homo Sapiens
  CDS (1)...(2856)
atgctggcggcgcggtgcattgtgggcagctccccgctctgccgctgccgccgccgtcgcccaaggaggatcggggccgggccgggccgggatgatccgggtcggaaggccgccgccgccggagggagcgggtcacccaacgccgcactgagccgcccccgccccgccccggccccgggggatgcgccgccccgagctgctgcctccgccgccgccgcagccgcagccgcagcgggcacagagcaggtagatggccccctcagggcaggcccggcggacacccctccctctggctggcggatgcagtgcctagcggccgcccttaaggacgaaaccaacatgagtgggggaggggagcaggccgacatcctgccggccaactacgtggtcaaggatcgctggaaggtgctgaaaaagatcgggggcgggggctttggtgagatctacgaggccatggacctgctgaccagggagaatgtggccctcaaggtggagtcagcccagcagcccaagcaggtcctcaagatggaggtggccgtgctcaagaagttgcaagggaaggaccatgtgtgcaggttcattggctgtggcaggaacgagaagtttaactatgtagtgatgcagctccagggccggaacctggccgacctgcgccgtagccagccgcgaggcaccttcacgctgagcaccacattgcggctgggcaagcagatcttggagtccatcgaggccatccactctgtgggcttcctgcaccgtgacatcaagccttcaaactttgccatgggcaggctgccctccacctacaggaagtgctatatgctggacttcgggctggcccggcagtacaccaacaccacgggggatgtgcggccccctcggaatgtggccgggtttcgaggaacggttcgctatgcctcagtcaatgcccacaagaaccgggagatgggccgccacgacgacctgtggtccctcttctacatgctggtggagtttgcagtgggccagctgccctggaggaagatcaaggacaaggaacaggtagggatgatcaaggagaagtatgagcaccggatgctgctgaagcacatgccgtcagagttccacctcttcctggaccacattgccagcctcgactacttcaccaagcccgactaccagttgatcatgtcagtgtttgagaacagcatgaaggagaggggcattgccgagaatgaggcctttgactgggagaaggcaggcaccgatgccctcctgtccacgagcacctctaccccgccccagcagaacacccggcagacggcagccatgtttggggtggtcaatgtgacgccagtgcctggggacctgctccgggagaacaccgaggatgtgctacagggagagcacctgagtgaccaggagaatgcacccccaattctgcccgggaggccctctgaggggctgggccccagtccccaccttgtcccccaccccgggggtcctgaggctgaagtctgggaggagacagatgtcaaccggaacaaactccggatcaacatcggcaaagtaactgccgccagggcgaagggcgtgggtggccttttctctcacccccgattcccagccttgtgcccctgccctgttcctcctaagcaccctgtccccggccatctgcctgcttgccctgcctctgtttcccggtccctccccgcactagcctcgctgtgtcttccatcatcatcatcctctgtctccttcaccctgaggagaccatccgcccacagccgcctcatcagccccagctcatggcactcccctctcctgcagagcccctgtgtggaggaggaacagagccgaggcatgggggtccccagctccccagtgcgtgcccccccagactcccccacaaccccagtccgttctctgcgctaccggagggtgaacagccctgagtcagaaaggctgtccacggcggacgggcgagtggagctacctgagaggaggtcacggatggatctgcctggctcgccctcgcgccaggcctgctcctctcagccagcccagatgctgtcagtggacacaggccacgctgaccgacaggccagtggccgcatggaygtgtcagcctctgtggagcaggaggccctgagcaacgccttccgctcggtgccgctggctgaggaggaggatttcgacagcaaagagtgggtcatcatcgacaaggagacggagctcaaggacttccctccaggggctgagcccagcacatcgggcaccacggatgaggagcccgaggagctgcggccactgcccgaggagggcgaagagcggcggcggctgggggcagagcccaccgtccggccccggggacgcagcatgcaggcgctggcggaggaggacctgcagcatttgccgccccagcccctgccaccccagctgagccaggscgatggccgttccgagacgtcacagccccccacgcctggcagcccttcccactcacccctgcactcgggaccccgccctcgacggagagagtcggaccccacaggcccacagagacagttggaggaggacagactctcggggcactccctcccgcggtacagccccctgcgacgactggcgtcctccgtgttctcctcctccacgctggagacggagcattaccctcaccccggcggcggcggctcctcgggctcctccggttccctcattcagcgcagccgctcggctgagagcagccctgtgcgggcgccccaccggcgccacgcgcccctcgctgctggcaaccacagactcatgccctcggtgctccgcatctcgcggtcccagctgcagcaggtgtgggcccggttcacccacaagacctag

SEQ ID NO: 228 - protein, 951 aa, Homo Sapiens
  VARIANT 810: Xaa = Any Amino Acid
MLAARCIVGSSPLCRCRRRRPRRIGAGPGRDDPGRKAAAAGGSGSPNAALSRPRPAPAPGDAPPRAAASAAAAAAAAAGTEQVDGPLRAGPADTPPSGWRMQCLAAALKDETNMSGGGEQADILPANYVVKDRWKVLKKIGGGGFGEIYEAMDLLTRENVALKVESAQQPKQVLKMEVAVLKKLQGKDHVCRFIGCGRNEKFNYVVMQLQGRNLADLRRSQPRGTFTLSTTLRLGKQILESIEAIHSVGFLHRDIKPSNFAMGRLPSTYRKCYMLDFGLARQYTNTTGDVRPPRNVAGFRGTVRYASVNAHKNREMGRHDDLWSLFYMLVEFAVGQLPWRKIKDKEQVGMIKEKYEHRMLLKHMPSEFHLFLDHIASLDYFTKPDYQLIMSVFENSMKERGIAENEAFDWEKAGTDALLSTSTSTPPQQNTRQTAAMFGVVNVTPVPGDLLRENTEDVLQGEHLSDQENAPPILPGRPSEGLGPSPHLVPHPGGPEAEVWEETDVNRNKLRINIGKVTAARAKGVGGLFSHPRFPALCPCPVPPKHPVPGHLPACPASVSRSLPALASLCLPSSSSSVSFTLRRPSAHSRLISPSSWHSPLLQSPCVEEEQSRGMGVPSSPVRAPPDSPTTPVRSLRYRRVNSPESERLSTADGRVELPERRSRMDLPGSPSRQACSSQPAQMLSVDTGHADRQASGRMDVSASVEQEALSNAFRSVPLAEEEDFDSKEWVIIDKETELKDFPPGAEPSTSGTTDEEPEELRPLPEEGEERRRLGAEPTVRPRGRSMQALAEEDLQHLPPQPLPPQLSQXDGRSETSQPPTPGSPSHSPLHSGPRPRRRESDPTGPQRQLEEDRLSGHSLPRYSPLRRLASSVFSSSTLETEHYPHPGGGGSSGSSGSLIQRSRSAESSPVRAPHRRHAPLAAGNHRLMPSVLRISRSQLQQVWARFTHKT

SEQ ID NO: 229 - DNA, 2556 bp, Homo Sapiens
  CDS (1)...(2556)
atgcagtgcctagcggccgcccttaaggacgaaaccaacatgagtgggggaggggagcaggccgacatcctgccggccaactacgtggtcaaggatcgctggaaggtgctgaaaaagatcgggggcgggggctttggtgagatctacgaggccatggacctgctgaccagggagaatgtggccctcaaggtggagtcagcccagcagcccaagcaggtcctcaagatggaggtggccgtgctcaagaagttgcaagggaaggaccatgtgtgcaggttcattggctgtggcaggaacgagaagtttaactatgtagtgatgcagctccagggccggaacctggccgacctgcgccgtagccagccgcgaggcaccttcacgctgagcaccacattgcggctgggcaagcagatcttggagtccatcgaggccatccactctgtgggcttcctgcaccgtgacatcaagccttcaaactttgccatgggcaggctgccctccacctacaggaagtgctatatgctggacttcgggctggcccggcagtacaccaacaccacgggggatgtgcggccccctcggaatgtggccgggtttcgaggaacggttcgctatgcctcagtcaatgcccacaagaaccgggagatgggccgccacgacgacctgtggtccctcttctacatgctggtggagtttgcagtgggccagctgccctggaggaagatcaaggacaaggaacaggtagggatgatcaaggagaagtatgagcaccggatgctgctgaagcacatgccgtcagagttccacctcttcctggaccacattgccagcctcgactacttcaccaagcccgactaccagttgatcatgtcagtgtttgagaacagcatgaaggagaggggcattgccgagaatgaggcctttgactgggagaaggcaggcaccgatgccctcctgtccacgagcacctctaccccgccccagcagaacacccggcagacggcagccatgtttggggtggtcaatgtgacgccagtgcctggggacctgctccgggagaacaccgaggatgtgctacagggagagcacctgagtgaccaggagaatgcacccccaattctgcccgggaggccctctgaggggctgggccccagtccccaccttgtcccccaccccgggggtcctgaggctgaagtctgggaggagacagatgtcaaccggaacaaactccggatcaacatcggcaaagtaactgccgccagggcgaagggcgtgggtggccttttctctcacccccgattcccagccttgtgcccctgccctgttcctcctaagcaccctgtccccggccatctgcctgcttgccctgcctctgtttcccggtccctccccgcactagcctcgctgtgtcttccatcatcatcatcctctgtctccttcaccctgaggagaccatccgcccacagccgcctcatcagccccagctcatggcactcccctctcctgcagagcccctgtgtggaggaggaacagagccgaggcatgggggtccccagctccccagtgcgtgcccccccagactcccccacaaccccagtccgttctctgcgctaccggagggtgaacagccctgagtcagaaaggctgtccacggcggacgggcgagtggagctacctgagaggaggtcacggatggatctgcctggctcgccctcgcgccaggcctgctcctctcagccagcccagatgctgtcagtggacacaggccacgctgaccgacaggccagtggccgcatggaygtgtcagcctctgtggagcaggaggccctgagcaacgccttccgctcggtgccgctggctgaggaggaggatttcgacagcaaagagtgggtcatcatcgacaaggagacggagctcaaggacttccctccaggggctgagcccagcacatcgggcaccacggatgaggagcccgaggagctgcggccactgcccgaggagggcgaagagcggcggcggctgggggcagagcccaccgtccggccccggggacgcagcatgcaggcgctggcggaggaggacctgcagcatttgccgccccagcccctgccaccccagctgagccaggscgatggccgttccgagacgtcacagccccccacgcctggcagcccttcccactcacccctgcactcgggaccccgccctcgacggagagagtcggaccccacaggcccacagagacagttggaggaggacagactctcggggcactccctcccgcggtacagccccctgcgacgactggcgtcctccgtgttctcctcctccacgctggagacggagcattaccctcaccccggcggcggcggctcctcgggctcctccggttccctcattcagcgcagccgctcggctgagagcagccctgtgcgggcgccccaccggcgccacgcgcccctcgctgctggcaaccacagactcatgccctcggtgctccgcatctcgcggtcccagctgcagcaggtgtgggcccggttcacccacaagacctag

SEQ ID NO: 230 - protein, 851 aa, Homo Sapiens
  VARIANT 710: Xaa = Any Amino Acid
MQCLAAALKDETNMSGGGEQADILPANYVVKDRWKVLKKIGGGGFGEIYEAMDLLTRENVALKVESAQQPKQVLKMEVAVLKKLQGKDHVCRFIGCGRNEKFNYVVMQLQGRNLADLRRSQPRGTFTLSTTLRLGKQILESIEAIHSVGFLHRDIKPSNFAMGRLPSTYRKCYMLDFGLARQYTNTTGDVRPPRNVAGFRGTVRYASVNAHKNREMGRHDDLWSLFYMLVEFAVGQLPWRKIKDKEQVGMIKEKYEHRMLLKHMPSEFHLFLDHIASLDYFTKPDYQLIMSVFENSMKERGIAENEAFDWEKAGTDALLSTSTSTPPQQNTRQTAAMFGVVNVTPVPGDLLRENTEDVLQGEHLSDQENAPPILPGRPSEGLGPSPHLVPHPGGPEAEVWEETDVNRNKLRINIGKVTAARAKGVGGLFSHPRFPALCPCPVPPKHPVPGHLPACPASVSRSLPALASLCLPSSSSSVSFTLRRPSAHSRLISPSSWHSPLLQSPCVEEEQSRGMGVPSSPVRAPPDSPTTPVRSLRYRRVNSPESERLSTADGRVELPERRSRMDLPGSPSRQACSSQPAQMLSVDTGHADRQASGRMDVSASVEQEALSNAFRSVPLAEEEDFDSKEWVIIDKETELKDFPPGAEPSTSGTTDEEPEELRPLPEEGEERRRLGAEPTVRPRGRSMQALAEEDLQHLPPQPLPPQLSQXDGRSETSQPPTPGSPSHSPLHSGPRPRRRESDPTGPQRQLEEDRLSGHSLPRYSPLRRLASSVFSSSTLETEHYPHPGGGGSSGSSGSLIQRSRSAESSPVRAPHRRHAPLAAGNHRLMPSVLRISRSQLQQVWARFTHKT

SEQ ID NO: 231 - DNA, 2517 bp, Homo Sapiens
  CDS (1)...(2517)
atgagtgggggaggggagcaggccgacatcctgccggccaactacgtggtcaaggatcgctggaaggtgctgaaaaagatcgggggcgggggctttggtgagatctacgaggccatggacctgctgaccagggagaatgtggccctcaaggtggagtcagcccagcagcccaagcaggtcctcaagatggaggtggccgtgctcaagaagttgcaagggaaggaccatgtgtgcaggttcattggctgtggcaggaacgagaagtttaactatgtagtgatgcagctccagggccggaacctggccgacctgcgccgtagccagccgcgaggcaccttcacgctgagcaccacattgcggctgggcaagcagatcttggagtccatcgaggccatccactctgtgggcttcctgcaccgtgacatcaagccttcaaactttgccatgggcaggctgccctccacctacaggaagtgctatatgctggacttcgggctggcccggcagtacaccaacaccacgggggatgtgcggccccctcggaatgtggccgggtttcgaggaacggttcgctatgcctcagtcaatgcccacaagaaccgggagatgggccgccacgacgacctgtggtccctcttctacatgctggtggagtttgcagtgggccagctgccctggaggaagatcaaggacaaggaacaggtagggatgatcaaggagaagtatgagcaccggatgctgctgaagcacatgccgtcagagttccacctcttcctggaccacattgccagcctcgactacttcaccaagcccgactaccagttgatcatgtcagtgtttgagaacagcatgaaggagaggggcattgccgagaatgaggcctttgactgggagaaggcaggcaccgatgccctcctgtccacgagcacctctaccccgccccagcagaacacccggcagacggcagccatgtttggggtggtcaatgtgacgccagtgcctggggacctgctccgggagaacaccgaggatgtgctacagggagagcacctgagtgaccaggagaatgcacccccaattctgcccgggaggccctctgaggggctgggccccagtccccaccttgtcccccaccccgggggtcctgaggctgaagtctgggaggagacagatgtcaaccggaacaaactccggatcaacatcggcaaagtaactgccgccagggcgaagggcgtgggtggccttttctctcacccccgattcccagccttgtgcccctgccctgttcctcctaagcaccctgtccccggccatctgcctgcttgccctgcctctgtttcccggtccctccccgcactagcctcgctgtgtcttccatcatcatcatcctctgtctccttcaccctgaggagaccatccgcccacagccgcctcatcagccccagctcatggcactcccctctcctgcagagcccctgtgtggaggaggaacagagccgaggcatgggggtccccagctccccagtgcgtgcccccccagactcccccacaaccccagtccgttctctgcgctaccggagggtgaacagccctgagtcagaaaggctgtccacggcggacgggcgagtggagctacctgagaggaggtcacggatggatctgcctggctcgccctcgcgccaggcctgctcctctcagccagcccagatgctgtcagtggacacaggccacgctgaccgacaggccagtggccgcatggaygtgtcagcctctgtggagcaggaggccctgagcaacgccttccgctcggtgccgctggctgaggaggaggatttcgacagcaaagagtgggtcatcatcgacaaggagacggagctcaaggacttccctccaggggctgagcccagcacatcgggcaccacggatgaggagcccgaggagctgcggccactgcccgaggagggcgaagagcggcggcggctgggggcagagcccaccgtccggccccggggacgcagcatgcaggcgctggcggaggaggacctgcagcatttgccgccccagcccctgccaccccagctgagccaggscgatggccgttccgagacgtcacagccccccacgcctggcagcccttcccactcacccctgcactcgggaccccgccctcgacggagagagtcggaccccacaggcccacagagacagttggaggaggacagactctcggggcactccctcccgcggtacagccccctgcgacgactggcgtcctccgtgttctcctcctccacgctggagacggagcattaccctcaccccggcggcggcggctcctcgggctcctccggttccctcattcagcgcagccgctcggctgagagcagccctgtgcgggcgccccaccggcgccacgcgcccctcgctgctggcaaccacagactcatgccctcggtgctccgcatctcgcggtcccagctgcagcaggtgtgggcccggttcacccacaagacctag

SEQ ID NO: 232 - protein, 838 aa, Homo Sapiens
  VARIANT 697: Xaa = Any Amino Acid
MSGGGEQADILPANYVVKDRWKVLKKIGGGGFGEIYEAMDLLTRENVALKVESAQQPKQVLKMEVAVLKKLQGKDHVCRFIGCGRNEKFNYVVMQLQGRNLADLRRSQPRGTFTLSTTLRLGKQILESIEAIHSVGFLHRDIKPSNFAMGRLPSTYRKCYMLDFGLARQYTNTTGDVRPPRNVAGFRGTVRYASVNAHKNREMGRHDDLWSLFYMLVEFAVGQLPWRKIKDKEQVGMIKEKYEHRMLLKHMPSEFHLFLDHIASLDYFTKPDYQLIMSVFENSMKERGIAENEAFDWEKAGTDALLSTSTSTPPQQNTRQTAAMFGVVNVTPVPGDLLRENTEDVLQGEHLSDQENAPPILPGRPSEGLGPSPHLVPHPGGPEAEVWEETDVNRNKLRINIGKVTAARAKGVGGLFSHPRFPALCPCPVPPKHPVPGHLPACPASVSRSLPALASLCLPSSSSSVSFTLRRPSAHSRLISPSSWHSPLLQSPCVEEEQSRGMGVPSSPVRAPPDSPTTPVRSLRYRRVNSPESERLSTADGRVELPERRSRMDLPGSPSRQACSSQPAQMLSVDTGHADRQASGRMDVSASVEQEALSNAFRSVPLAEEEDFDSKEWVIIDKETELKDFPPGAEPSTSGTTDEEPEELRPLPEEGEERRRLGAEPTVRPRGRSMQALAEEDLQHLPPQPLPPQLSQXDGRSETSQPPTPGSPSHSPLHSGPRPRRRESDPTGPQRQLEEDRLSGHSLPRYSPLRRLASSVFSSSTLETEHYPHPGGGGSSGSSGSLIQRSRSAESSPVRAPHRRHAPLAAGNHRLMPSVLRISRSQLQQVWARFTHKT

SEQ ID NO: 233 - DNA, 6165 bp, Homo Sapiens
  CDS (1)...(6165)
atgttgaagttcaaatatggagcgcggaatcctttggatgctggtgctgctgaacccattgccagccgggcctccaggctgaatctgttcttccaggggaaaccaccctttatgactcaacagcagatgtctcctctttcccgagaagggatattagatgccctctttgttctctttgaagaatgcagtcagcctgctctgatgaagattaagcacgtgagcaactttgtccggaagtattccgacaccatagctgagttacaggagctccagccttcggcaaaggacttcgaagtcagaagtcttgtaggttgtggtcactttgctgaagtgcaggtggtaagagagaaagcaaccggggacatctatgctatgaaagtgatgaagaagaaggctttattggcccaggagcaggtttcattttttgaggaagagcggaacatattatctcgaagcacaagcccgtggatcccccaattacagtatgcctttcaggacaaaaatcacctttatctggtcatggaatatcagcctggaggggacttgctgtcacttttgaatagatatgaggaccagttagatgaaaacctgatacagttttacctagctgagctgattttggctgttcacagcgttcatctgatgggatacgtgcatcgagacatcaagcctgagaacattctcgttgaccgcacaggacacatcaagctggtggattttggatctgccgcgaaaatgaattcaaacaagatggtgaatgccaaactcccgattgggaccccagattacatggctcctgaagtgctgactgtgatgaacggggatggaaaaggcacctacggcctggactgtgactggtggtcagtgggcgtgattgcctatgagatgatttatgggagatcccccttcgcagagggaacctctgccagaaccttcaataacattatgaatttccagcggtttttgaaatttccagatgaccccaaagtgagcagtgactttcttgatctgattcaaagcttgttgtgcggccagaaagagagactgaagtttgaaggtctttgctgccatcctttcttctctaaaattgactggaacaacattcgtaactctcctccccccttcgttcccaccctcaagtctgacgatgacacctccaattttgatgaaccagagaagaattcgtgggtttcatcctctccgtgccagctgagcccctcaggcttctcgggtgaagaactgccgtttgtggggttttcgtacagcaaggcactggggattcttggtagatctgagtctgttgtgtcgggtctggactcccctgccaagactagctccatggaaaagaaacttctcatcaaaagcaaagagctacaagactctcaggacaagtgtcacaagatggagcaggaaatgacccggttacatcggagagtgtcagaggtggaggctgtgcttagtcagaaggaggtggagctgaaggcctctgagactcagagatccctcctggagcaggaccttgctacctacatcacagaatgcagtagcttaaagcgaagtttggagcaagcacggatggaggtgtcccaggaggatgacaaagcactgcagcttctccatgatatcagagagcagagccggaagctccaagaaatcaaagagcaggagtaccaggctcaagtggaagaaatgaggttgatgatgaatcagttggaagaggatcttgtctcagcaagaagacggagtgatctctacgaatctgagctgagagagtctcggcttgctgctgaagaattcaagcggaaagcgacagaatgtcagcataaactgttgaaggctaaggatcaagggaagcctgaagtgggagaatatgcgaaactggagaagatcaatgctgagcagcagctcaaaattcaggagctccaagagaaactggagaaggctgtaaaagccagcacggaggccaccgagctgctgcagaatatccgccaggcaaaggagcgagccgagagggagctggagaagctgcagaaccgagaggattcttctgaaggcatcagaaagaagctggtggaagctgaggaacgccgccattctctggagaacaaggtaaagagactagagaccatggagcgtagagaaaacagactgaaggatgacatccagacaaaatcccaacagatccagcagatggctgataaaattctggagctcgaagagaaacatcgggaggcccaagtctcagcccagcacctagaagtgcacctgaaacagaaagagcagcactatgaggaaaagattaaagtgttggacaatcagataaagaaagacctggctgacaaggagacactggagaacatgatgcagagacacgaggaggaggcccatgagaagggcaaaattctcagcgaacagaaggcgatgatcaatgctatggattccaagatcagatccctggaacagaggattgtggaactgtctgaagccaataaacttgcagcaaatagcagtctttttacccaaaggaacatgaaggcccaagaagagatgatttctgaactcaggcaacagaaattttacctggagacacaggctgggaagttggaggcccagaaccgaaaactggaggagcagctggagaagatcagccaccaagaccacagtgacaagaatcggctgctggaactggagacaagattgcgggaggtcagtctagagcacgaggagcagaaactggagctcaagcgccagctcacagagctacagctctccctgcaggagcgcgagtcacagttgacagccctgcaggctgcacgggcggccctggagagccagcttcgccaggcgaagacagagctggaagagaccacagcagaagctgaagaggagatccaggcactcacggcacatagagatgaaatccagcgcaaatttgatgctcttcgtaacagctgtactgtaatcacagacctggaggagcagctaaaccagctgaccgaggacaacgctgaactcaacaaccaaaacttctacttgtccaaacaactcgatgaggcttctggcgccaacgacgagattgtacaactgcgaagtgaagtggaccatctccgccgggagatcacggaacgagagatgcagcttaccagccagaagcaaacgatggaggctctgaagaccacgtgcaccatgctggaggaacaggtcatggatttggaggccctaaacgatgagctgctagaaaaagagcggcagtgggaggcctggaggagcgtcctgggtgatgagaaatcccagtttgagtgtcgggttcgagagctgcagaggatgctggacaccgagaaacagagcagggcgagagccgatcagcggatcaccgagtctcgccaggtggtggagctggcagtgaaggagcacaaggctgagattctcgctctgcagcaggctctcaaagagcagaagctgaaggccgagagcctctctgacaagctcaatgacctggagaagaagcatgctatgcttgaaatgaatgcccgaagcttacagcagaagctggagactgaacgagagctcaaacagaggcttctggaagagcaagccaaattacagcagcagatggacctgcagaaaaatcacattttccgtctgactcaaggactgcaagaagctctagatcgggctgatctactgaagacagaaagaagtgacttggagtatcagctggaaaacattcaggttctctattctcatgaaaaggtgaaaatggaaggcactatttctcaacaaaccaaactcattgattttctgcaagccaaaatggaccaacctgctaaaaagaaaaaggttcctctgcagtacaatgagctgaagctggccctggagaaggagaaagctcgctgtgcagagctagaggaagcccttcagaagacccgcatcgagctccggtccgcccgggaggaagctgcccaccgcaaagcaacggaccacccacacccatccacgccagccaccgcgaggcagcagatcgccatgtccgccatcgtgcggtcgccagagcaccagcccagtgccatgagcctgctggccccgccatccagccgcagaaaggagtcttcaactccagaggaatttagtcggcgtcttaaggaacgcatgcaccacaatattcctcaccgattcaacgtaggactgaacatgcgagccacaaagtgtgctgtgtgtctggataccgtgcactttggacgccaggcatccaaatgtctcgaatgtcaggtgatgtgtcaccccaagtgctccacgtgcttgccagccacctgcggcttgcctgctgaatatgccacacacttcaccgaggccttctgccgtgacaaaatgaactccccaggtctccagaccaaggagcccagcagcagcttgcacctggaagggtggatgaaggtgcccaggaataacaaacgaggacagcaaggctgggacaggaagtacattgtcctggagggatcaaaagtcctcatttatgacaatgaagccagagaagctggacagaggccggtggaagaatttgagctgtgccttcccgacggggatgtatctattcatggtgccgttggtgcttccgaactcgcaaatacagccaaagcagatgtcccatacatactgaagatggaatctcacccgcacaccacctgctggcccgggagaaccctctacttgctagctcccagcttccctgacaaacagcgctgggtcaccgccttagaatcagttgtcgcaggtgggagagtttctagggaaaaagcagaagctgatgctaaactgcttggaaactccctgctgaaactggaaggtgatgaccgtctagacatgaactgcacgctgcccttcagtgaccaggtggtgttggtgggcaccgaggaagggctctacgccctgaatgtcttgaaaaactccctaacccatgtcccaggaattggagcagtcttccaaatttatattatcaaggacctggagaagctactcatgatagcaggagaagagcgggcactgtgtcttgtggacgtgaagaaagtgaaacagtccctggcccagtcccacctgcctgcccagcccgacatctcacccaacatttttgaagctgtcaagggctgccacttgtttggggcaggcaagattgagaacgggctctgcatctgtgcagccatgcccagcaaagtcgtcattctccgctacaacgaaaacctcagcaaatactgcatccggaaagagatagagacctcagagccctgcagctgtatccacttcaccaattacagtatcctcattggaaccaataaattctacgaaatcgacatgaagcagtacacgctcgaggaattcctggataagaatgaccattccttggcacctgctgtgtttgccgcctcttccaacagcttccctgtctcaatcgtgcaggtgaacagcgcagggcagcgagaggagtacttgctgtgtttccacgaatttggagtgttcgtggattcttacggaagacgtagccgcacagacgatctcaagtggagtcgcttacctttggcctttgcctacagagaaccctatctgtttgtgacccacttcaactcactcgaagtaattgagatccaggcacgctcctcagcagggacccctgcccgagcgtacctggacatcccgaacccgcgctacctgggccctgccatttcctcaggagcgatttacttggcgtcctcataccaggataaattaagggtcatttgctgcaagggaaacctcgtgaaggagtccggcactgaacaccaccggggcccgtccacctcccgcagcagccccaacaagcgaggcccacccacgtacaacgagcacatcaccaagcgcgtggcctccagcccagcgccgcccgaaggccccagccacccgcgagagccaagcacaccccaccgctaccgcgaggggcggaccgagctgcgcagggacaagtctcctggccgccccctggagcgagagaagtcccccggccggatactcagcacgcggagagagcggtcccccgcgaggctgtttgaagacagcagcaggggccggctgcctgcgggagccgtgaggaccccgctgtcccaggtgaacaaggtctgggaccagtcttcagtataa

SEQ ID NO: 234 - protein, 2054 aa, Homo Sapiens
MLKFKYGARNPLDAGAAEPIASRASRLNLFFQGKPPFMTQQQMSPLSREGILDALFVLFEECSQPALMKIKHVSNFVRKYSDTIAELQELQPSAKDFEVRSLVGCGHFAEVQVVREKATGDIYAMKVMKKKALLAQEQVSFFEEERNILSRSTSPWIPQLQYAFQDKNHLYLVMEYQPGGDLLSLLNRYEDQLDENLIQFYLAELILAVHSVHLMGYVHRDIKPENILVDRTGHIKLVDFGSAAKMNSNKMVNAKLPIGTPDYMAPEVLTVMNGDGKGTYGLDCDWWSVGVIAYEMIYGRSPFAEGTSARTFNNIMNFQRFLKFPDDPKVSSDFLDLIQSLLCGQKERLKFEGLCCHPFFSKIDWNNIRNSPPPFVPTLKSDDDTSNFDEPEKNSWVSSSPCQLSPSGFSGEELPFVGFSYSKALGILGRSESVVSGLDSPAKTSSMEKKLLIKSKELQDSQDKCHKMEQEMTRLHRRVSEVEAVLSQKEVELKASETQRSLLEQDLATYITECSSLKRSLEQARMEVSQEDDKALQLLHDIREQSRKLQEIKEQEYQAQVEEMRLMMNQLEEDLVSARRRSDLYESELRESRLAAEEFKRKATECQHKLLKAKDQGKPEVGEYAKLEKINAEQQLKIQELQEKLEKAVKASTEATELLQNIRQAKERAERELEKLQNREDSSEGIRKKLVEAEERRHSLENKVKRLETMERRENRLKDDIQTKSQQIQQMADKILELEEKHREAQVSAQHLEVHLKQKEQHYEEKIKVLDNQIKKDLADKETLENMMQRHEEEAHEKGKILSEQKAMINAMDSKIRSLEQRIVELSEANKLAANSSLFTQRNMKAQEEMISELRQQKFYLETQAGKLEAQNRKLEEQLEKISHQDHSDKNRLLELETRLREVSLEHEEQKLELKRQLTELQLSLQERESQLTALQAARAALESQLRQAKTELEETTAEAEEEIQALTAHRDEIQRKFDALRNSCTVITDLEEQLNQLTEDNAELNNQNFYLSKQLDEASGANDEIVQLRSEVDHLRREITEREMQLTSQKQTMEALKTTCTMLEEQVMDLEALNDELLEKERQWEAWRSVLGDEKSQFECRVRELQRMLDTEKQSRARADQRITESRQVVELAVKEHKAEILALQQALKEQKLKAESLSDKLNDLEKKHAMLEMNARSLQQKLETERELKQRLLEEQAKLQQQMDLQKNHIFRLTQGLQEALDRADLLKTERSDLEYQLENIQVLYSHEKVKMEGTISQQTKLIDFLQAKMDQPAKKKKVPLQYNELKLALEKEKARCAELEEALQKTRIELRSAREEAAHRKATDHPHPSTPATARQQIAMSAIVRSPEHQPSAMSLLAPPSSRRKESSTPEEFSRRLKERMHHNIPHRFNVGLNMRATKCAVCLDTVHFGRQASKCLECQVMCHPKCSTCLPATCGLPAEYATHFTEAFCRDKMNSPGLQTKEPSSSLHLEGWMKVPRNNKRGQQGWDRKYIVLEGSKVLIYDNEAREAGQRPVEEFELCLPDGDVSIHGAVGASELANTAKADVPYILKMESHPHTTCWPGRTLYLLAPSFPDKQRWVTALESVVAGGRVSREKAEADAKLLGNSLLKLEGDDRLDMNCTLPFSDQVVLVGTEEGLYALNVLKNSLTHVPGIGAVFQIYIIKDLEKLLMIAGEERALCLVDVKKVKQSLAQSHLPAQPDISPNIFEAVKGCHLFGAGKIENGLCICAAMPSKVVILRYNENLSKYCIRKEIETSEPCSCIHFTNYSILIGTNKFYEIDMKQYTLEEFLDKNDHSLAPAVFAASSNSFPVSIVQVNSAGQREEYLLCFHEFGVFVDSYGRRSRTDDLKWSRLPLAFAYREPYLFVTHFNSLEVIEIQARSSAGTPARAYLDIPNPRYLGPAISSGAIYLASSYQDKLRVICCKGNLVKESGTEHHRGPSTSRSSPNKRGPPTYNEHITKRVASSPAPPEGPSHPREPSTPHRYREGRTELRRDKSPGRPLEREKSPGRILSTRRERSPARLFEDSSRGRLPAGAVRTPLSQVNKVWDQSSV

SEQ ID NO: 235 - DNA, 5877 bp, Homo Sapiens
  CDS (1)...(5877)
atgttgaagttcaaatatggagcgcggaatcctttggatgctggtgctgctgaacccattgccagccgggcctccaggctgaatctgttcttccaggggaaaccaccctttatgactcaacagcagatgtctcctctttcccgagaagggatattagatgccctctttgttctctttgaagaatgcagtcagcctgctctgatgaagattaagcacgtgagcaactttgtccggaagtattccgacaccatagctgagttacaggagctccagccttcggcaaaggacttcgaagtcagaagtcttgtaggttgtggtcactttgctgaagtgcaggtggtaagagagaaagcaaccggggacatctatgctatgaaagtgatgaagaagaaggctttattggcccaggagcaggtttcattttttgaggaagagcggaacatattatctcgaagcacaagcccgtggatcccccaattacagtatgcctttcaggacaaaaatcacctttatctggtcatggaatatcagcctggaggggacttgctgtcacttttgaatagatatgaggaccagttagatgaaaacctgatacagttttacctagctgagctgattttggctgttcacagcgttcatctgatgggatacgtgcatcgagacatcaagcctgagaacattctcgttgaccgcacaggacacatcaagctggtggattttggatctgccgcgaaaatgaattcaaacaagatggtgaatgccaaactcccgattgggaccccagattacatggctcctgaagtgctgactgtgatgaacggggatggaaaaggcacctacggcctggactgtgactggtggtcagtgggcgtgattgcctatgagatgatttatgggagatcccccttcgcagagggaacctctgccagaaccttcaataacattatgaatttccagcggtttttgaaatttccagatgaccccaaagtgagcagtgactttcttgatctgattcaaagcttgttgtgcggccagaaagagagactgaagtttgaaggtctttgctgccatcctttcttctctaaaattgactggaacaacattcgtaactctcctccccccttcgttcccaccctcaagtctgacgatgacacctccaattttgatgaaccagagaagaattcgtgggtttcatcctctccgtgccagctgagcccctcaggcttctcgggtgaagaactgccgtttgtggggttttcgtacagcaaggcactggggattcttggtagatctgagtctgttgtgtcgggtctggactcccctgccaagactagctccatggaaaagaaacttctcatcaaaagcaaagagctacaagactctcaggacaagtgtcacaagatggagcaggaaatgacccggttacatcggagagtgtcagaggtggaggctgtgcttagtcagaaggaggtggagctgaaggcctctgagactcagagatccctcctggagcaggaccttgctacctacatcacagaatgcagtagcttaaagcgaagtttggagcaagcacggatggaggtgtcccaggaggatgacaaagcactgcagcttctccatgatatcagagagcagagccggaagctccaagaaatcaaagagcaggagtaccaggctcaagtggaagaaatgaggttgatgatgaatcagttggaagaggatcttgtctcagcaagaagacggagtgatctctacgaatctgagctgagagagtctcggcttgctgctgaagaattcaagcggaaagcgacagaatgtcagcataaactgttgaaggctaaggatcaagggaagcctgaagtgggagaatatgcgaaactggagaagatcaatgctgagcagcagctcaaaattcaggagctccaagagaaactggagaaggctgtaaaagccagcacggaggccaccgagctgctgcagaatatccgccaggcaaaggagcgagccgagagggagctggagaagctgcagaaccgagaggattcttctgaaggcatcagaaagaagctggtggaagctgaggaacgccgccattctctggagaacaaggtaaagagactagagaccatggagcgtagagaaaacagactgaaggatgacatccagacaaaatcccaacagatccagcagatggctgataaaattctggagctcgaagagaaacatcgggaggcccaagtctcagcccagcacctagaagtgcacctgaaacagaaagagcagcactatgaggaaaagattaaagtgttggacaatcagataaagaaagacctggctgacaaggagacactggagaacatgatgcagagacacgaggaggaggcccatgagaagggcaaaattctcagcgaacagaaggcgatgatcaatgctatggattccaagatcagatccctggaacagaggattgtggaactgtctgaagccaataaacttgcagcaaatagcagtctttttacccaaaggaacatgaaggcccaagaagagatgatttctgaactcaggcaacagaaattttacctggagacacaggctgggaagttggaggcccagaaccgaaaactggaggagcagctggagaagatcagccaccaagaccacagtgacaagaatcggctgctggaactggagacaagattgcgggaggtcagtctagagcacgaggagcagaaactggagctcaagcgccagctcacagagctacagctctccctgcaggagcgcgagtcacagttgacagccctgcaggctgcacgggcggccctggagagccagcttcgccaggcgaagacagagctggaagagaccacagcagaagctgaagaggagatccaggcactcacggcacatagagatgaaatccagcgcaaatttgatgctcttcgtaacagctgtactgtaatcacagacctggaggagcagctaaaccagctgaccgaggacaacgctgaactcaacaaccaaaacttctacttgtccaaacaactcgatgaggcttctggcgccaacgacgagattgtacaactgcgaagtgaagtggaccatctccgccgggagatcacggaacgagagatgcagcttaccagccagaagcaaacgatggaggctctgaagaccacgtgcaccatgctggaggaacaggtcatggatttggaggccctaaacgatgagctgctagaaaaagagcggcagtgggaggcctggaggagcgtcctgggtgatgagaaatcccagtttgagtgtcgggttcgagagctgcagaggatgctggacaccgagaaacagagcagggcgagagccgatcagcggatcaccgagtctcgccaggtggtggagctggcagtgaaggagcacaaggctgagattctcgctctgcagcaggctctcaaagagcagaagctgaaggccgagagcctctctgacaagctcaatgacctggagaagaagcatgctatgcttgaaatgaatgcccgaagcttacagcagaagctggagactgaacgagagctcaaacagaggcttctggaagagcaagccaaattacagcagcagatggacctgcagaaaaatcacattttccgtctgactcaaggactgcaagaagctctagatcgggctgatctactgaagacagaaagaagtgacttggagtatcagctggaaaacattcaggttctctattctcatgaaaaggtgaaaatggaaggcactatttctcaacaaaccaaactcattgattttctgcaagccaaaatggaccaacctgctaaaaagaaaaaggttcctctgcagtacaatgagctgaagctggccctggagaaggagaaagctcgctgtgcagagctagaggaagcccttcagaagacccgcatcgagctccggtccgcccgggaggaagctgcccaccgcaaagcaacggaccacccacacccatccacgccagccaccgcgaggcagcagatcgccatgtccgccatcgtgcggtcgccagagcaccagcccagtgccatgagcctgctggccccgccatccagccgcagaaaggagtcttcaactccagaggaatttagtcggcgtcttaaggaacgcatgcaccacaatattcctcaccgattcaacgtaggactgaacatgcgagccacaaagtgtgctgtgtgtctggataccgtgcactttggacgccaggcatccaaatgtctcgaatgtcaggtgatgtgtcaccccaagtgctccacgtgcttgccagccacctgcggcttgcctgctgaatatgccacacacttcaccgaggccttctgccgtgacaaaatgaactccccaggtctccagaccaaggagcccagcagcagcttgcacctggaagggtggatgaaggtgcccaggaataacaaacgaggacagcaaggctgggacaggaagtacattgtcctggagggatcaaaagtcctcatttatgacaatgaagccagagaagctggacagaggccggtggaagaatttgagctgtgccttcccgacggggatgtatctattcatggtgccgttggtgcttccgaactcgcaaatacagccaaagcagatgtcccatacatactgaagatggaatctcacccgcacaccacctgctggcccgggagaaccctctacttgctagctcccagcttccctgacaaacagcgctgggtcaccgccttagaatcagttgtcgcaggtgggagagtttctagggaaaaagcagaagctgatgctaaactgcttggaaactccctgctgaaactggaaggtgatgaccgtctagacatgaactgcacgctgcccttcagtgaccaggtggtgttggtgggcaccgaggaagggctctacgccctgaatgtcttgaaaaactccctaacccatgtcccaggaattggagcagtcttccaaatttatattatcaaggacctggagaagctactcatgatagcaggagaagagcgggcactgtgtcttgtggacgtgaagaaagtgaaacagtccctggcccagtcccacctgcctgcccagcccgacatctcacccaacatttttgaagctgtcaagggctgccacttgtttggggcaggcaagattgagaacgggctctgcatctgtgcagccatgcccagcaaagtcgtcattctccgctacaacgaaaacctcagcaaatactgcatccggaaagagatagagacctcagagccctgcagctgtatccacttcaccaattacagtatcctcattggaaccaataaattctacgaaatcgacatgaagcagtacacgctcgaggaattcctggataagaatgaccattccttggcacctgctgtgtttgccgcctcttccaacagcttccctgtctcaatcgtgcaggtgaacagcgcagggcagcgagaggagtacttgctgtgtttccacgaatttggagtgttcgtggattcttacggaagacgtagccgcacagacgatctcaagtggagtcgcttacctttggcctttgcctacagagaaccctatctgtttgtgacccacttcaactcactcgaagtaattgagatccaggcacgctcctcagcagggacccctgcccgagcgtacctggacatcccgaacccgcgctacctgggccctgccatttcctcaggagcgatttacttggcgtcctcataccaggataaattaagggtcatttgctgcaagggaaacctcgtgaaggagtccggcactgaacaccaccggggcccgtccacctcccgcagatttcaaagccatatggctagagatgaatataaaccttga

SEQ ID NO: 236 - protein, 1958 aa, Homo Sapiens
MLKFKYGARNPLDAGAAEPIASRASRLNLFFQGKPPFMTQQQMSPLSREGILDALFVLFEECSQPALMKIKHVSNFVRKYSDTIAELQELQPSAKDFEVRSLVGCGHFAEVQVVREKATGDIYAMKVMKKKALLAQEQVSFFEEERNILSRSTSPWIPQLQYAFQDKNHLYLVMEYQPGGDLLSLLNRYEDQLDENLIQFYLAELILAVHSVHLMGYVHRDIKPENILVDRTGHIKLVDFGSAAKMNSNKMVNAKLPIGTPDYMAPEVLTVMNGDGKGTYGLDCDWWSVGVIAYEMIYGRSPFAEGTSARTFNNIMNFQRFLKFPDDPKVSSDFLDLIQSLLCGQKERLKFEGLCCHPFFSKIDWNNIRNSPPPFVPTLKSDDDTSNFDEPEKNSWVSSSPCQLSPSGFSGEELPFVGFSYSKALGILGRSESVVSGLDSPAKTSSMEKKLLIKSKELQDSQDKCHKMEQEMTRLHRRVSEVEAVLSQKEVELKASETQRSLLEQDLATYITECSSLKRSLEQARMEVSQEDDKALQLLHDIREQSRKLQEIKEQEYQAQVEEMRLMMNQLEEDLVSARRRSDLYESELRESRLAAEEFKRKATECQHKLLKAKDQGKPEVGEYAKLEKINAEQQLKIQELQEKLEKAVKASTEATELLQNIRQAKERAERELEKLQNREDSSEGIRKKLVEAEERRHSLENKVKRLETMERRENRLKDDIQTKSQQIQQMADKILELEEKHREAQVSAQHLEVHLKQKEQHYEEKIKVLDNQIKKDLADKETLENMMQRHEEEAHEKGKILSEQKAMINAMDSKIRSLEQRIVELSEANKLAANSSLFTQRNMKAQEEMISELRQQKFYLETQAGKLEAQNRKLEEQLEKISHQDHSDKNRLLELETRLREVSLEHEEQKLELKRQLTELQLSLQERESQLTALQAARAALESQLRQAKTELEETTAEAEEEIQALTAHRDEIQRKFDALRNSCTVITDLEEQLNQLTEDNAELNNQNFYLSKQLDEASGANDEIVQLRSEVDHLRREITEREMQLTSQKQTMEALKTTCTMLEEQVMDLEALNDELLEKERQWEAWRSVLGDEKSQFECRVRELQRMLDTEKQSRARADQRITESRQVVELAVKEHKAEILALQQALKEQKLKAESLSDKLNDLEKKHAMLEMNARSLQQKLETERELKQRLLEEQAKLQQQMDLQKNHIFRLTQGLQEALDRADLLKTERSDLEYQLENIQVLYSHEKVKMEGTISQQTKLIDFLQAKMDQPAKKKKVPLQYNELKLALEKEKARCAELEEALQKTRIELRSAREEAAHRKATDHPHPSTPATARQQIAMSAIVRSPEHQPSAMSLLAPPSSRRKESSTPEEFSRRLKERMHHNIPHRFNVGLNMRATKCAVCLDTVHFGRQASKCLECQVMCHPKCSTCLPATCGLPAEYATHFTEAFCRDKMNSPGLQTKEPSSSLHLEGWMKVPRNNKRGQQGWDRKYIVLEGSKVLIYDNEAREAGQRPVEEFELCLPDGDVSIHGAVGASELANTAKADVPYILKMESHPHTTCWPGRTLYLLAPSFPDKQRWVTALESVVAGGRVSREKAEADAKLLGNSLLKLEGDDRLDMNCTLPFSDQVVLVGTEEGLYALNVLKNSLTHVPGIGAVFQIYIIKDLEKLLMIAGEERALCLVDVKKVKQSLAQSHLPAQPDISPNIFEAVKGCHLFGAGKIENGLCICAAMPSKVVILRYNENLSKYCIRKEIETSEPCSCIHFTNYSILIGTNKFYEIDMKQYTLEEFLDKNDHSLAPAVFAASSNSFPVSIVQVNSAGQREEYLLCFHEFGVFVDSYGRRSRTDDLKWSRLPLAFAYREPYLFVTHFNSLEVIEIQARSSAGTPARAYLDIPNPRYLGPAISSGAIYLASSYQDKLRVICCKGNLVKESGTEHHRGPSTSRRFQSHMARDEYKP

SEQ ID NO: 237 - DNA, 936 bp, Homo Sapiens
  CDS (1)...(936)
atggcctttcttgtggctcaccctatgcagtttgtgtatttgttgacaactttatgtgtttttaatatggtttttgccaaacttggtttttccgagaccgtcttttctcagaggctcagttttaccgtcctatctgcagtcggctactttcagtggcagaagaggccacatctgcttcctgtaggccctctgggcagaagcatgcgctggtgtctcctcctgatctgggcccaggggctgaggcaggctcccctcgcctcaggaatgatgacaggcacaatagaaacaacggggaacatttctgcagagaaaggtggctctatcatcttacaatgtcacctctcctccaccacggcacaagtgacccaggtcaactgggagcagcaggaccagcttctggccatttgtaatgctgacttggggtggcacatctccccatccttcaaggatcgagtggccccaggtcccggcctgggcctcaccctccagtcgctgaccgtgaacgatacaggggagtacttctgcatctatcacacctaccctgatgggacgtacactgggagaatcttcctggaggtcctagaaagctcagtggctgagcacggtgccaggttccagattccattgcttggagccatggccgcgacgctggtggtcatctgcacagcagtcatcgtggtggtcgcgttgactagaaagaagaaagccctcagaatccattctgtggaaggtgacctcaggagaaaatcagctggacaggaggaatggagccccagtgctccctcacccccaggaagctgtgtccaggcagaagctgcacctgctgggctctgtggagagcagcggggagaggactgtgccgagctgcatgactacttcaatgtcctgagttacagaagcctgggtaactgcagcttcttcacagagactggttag

SEQ ID NO: 238 - protein, 311 aa, Homo Sapiens
MAFLVAHPMQFVYLLTTLCVFNMVFAKLGFSETVFSQRLSFTVLSAVGYFQWQKRPHLLPVGPLGRSMRWCLLLIWAQGLRQAPLASGMMTGTIETTGNISAEKGGSIILQCHLSSTTAQVTQVNWEQQDQLLAICNADLGWHISPSFKDRVAPGPGLGLTLQSLTVNDTGEYFCIYHTYPDGTYTGRIFLEVLESSVAEHGARFQIPLLGAMAATLVVICTAVIVVVALTRKKKALRIHSVEGDLRRKSAGQEEWSPSAPSPPGSCVQAEAAPAGLCGEQRGEDCAELHDYFNVLSYRSLGNCSFFTETG

SEQ ID NO: 239 - DNA, 672 bp, Homo Sapiens
  CDS (1)...(672)
atgatgacaggcacaatagaaacaacggggaacatttctgcagagaaaggtggctctatcatcttacaatgtcacctctcctccaccacggcacaagtgacccaggtcaactgggagcagcaggaccagcttctggccatttgtaatgctgacttggggtggcacatctccccatccttcaaggatcgagtggccccaggtcccggcctgggcctcaccctccagtcgctgaccgtgaacgatacaggggagtacttctgcatctatcacacctaccctgatgggacgtacactgggagaatcttcctggaggtcctagaaagctcagtggctgagcacggtgccaggttccagattccattgcttggagccatggccgcgacgctggtggtcatctgcacagcagtcatcgtggtggtcgcgttgactagaaagaagaaagccctcagaatccattctgtggaaggtgacctcaggagaaaatcagctggacaggaggaatggagccccagtgctccctcacccccaggaagctgtgtccaggcagaagctgcacctgctgggctctgtggagagcagcggggagaggactgtgccgagctgcatgactacttcaatgtcctgagttacagaagcctgggtaactgcagcttcttcacagagactggttag

SEQ ID NO: 240 - protein, 223 aa, Homo Sapiens [sequence omitted]

SEQ ID NO: 241 - DNA, 1821 bp, Homo Sapiens
  CDS (1)...(1821)
atgcttcacacggccatatcatgctggcagccattcctgggtctggctgtggtgttaatcttcatgggatccaccattggctgccccgctcgctgtgagtgctctgcccagaacaaatctgttagctgtcacagaaggcgattgatcgccatcccagagggcattcccatcgaaaccaaaatcttggacctcagtaaaaacaggctaaaaagcgtcaaccctgaagaattcatatcatatcctctgctggaagagatagacttgagtgacaacatcattgccaatgtggaaccaggagcattcaacaatctctttaacctgcgttccctccgcctaaaaggcaatcgtctaaagctggtccctttgggagtattcacggggctgtccaatctcactaagcttgacattagtgagaataagattgtcattttactagactacatgttccaagatctacataacctgaagtctctagaagtgggggacaatgatttggtttatatatcacacagggcattcagtgggcttcttagcttggagcagctcaccctggagaaatgcaacttaacagcagtaccaacagaagccctctcccacctccgcagcctcatcagcctgcatctgaagcatctcaatatcaacaatatgcctgtgtatgcctttaaaagattgttccacctgaaacacctagagattgactattggcctttactggatatgatgcctgccaatagcctctacggtctcaacctcacatccctttcagtcaccaacaccaatctgtctactgtacccttccttgcctttaaacacctggtatacctgactcaccttaacctctcctacaatcccatcagcactattgaagcaggcatgttctctgacctgatccgccttcaggagcttcatatagtgggggcccagcttcgcaccattgagcctcactccttccaagggctccgcttcctacgcgtgctcaatgtgtctcagaacctgctggaaactttggaagagaatgtcttctcctcccctagggctctggaggtcttgagcattaacaacaaccctctggcctgtgactgccgccttctctggatcttgcagcgacagcccaccctgcagtttggtggccagcaacctatgtgtgctggcccagacaccatccgtgagaggtctttcaaggatttccatagcactgccctttctttttactttacctgcaaaaaacccaaaatccgtgaaaagaagttgcagcatctgctagtagatgaagggcagacagtccagctagaatgcagtgcagatggagacccgcagcctgtgatttcctgggtgacaccccgaaggcgtttcatcaccaccaagtccaatggaagagccaccgtgttgggtgatggcaccttggaaatccgctttgcccaggatcaagacagcgggatgtatgtttgcatcgctagcaatgctgctgggaatgataccttcacagcctccttaactgtgaaaggattcgcttcagatcgttttctttatgcgaacaggacccctatgtacatgaccgactccaatgacaccatttccaatggcaccaatgccaatactttttccctggaccttaaaacaatactggtgtctacagctatgggctgcttcacattcctgggagtggttttattttgttttcttctcctttttgtgtggagccgagggaaaggcaagcacaaaaacagcattgaccttgagtatgtgcccagaaaaaacaatggtgctgttgtggaaggggaggtagctggacccaggaggttcaacatgaaaatgatttga

SEQ ID NO: 242 - protein, 606 aa, Homo Sapiens
MLHTAISCWQPFLGLAVVLIFMGSTIGCPARCECSAQNKSVSCHRRRLIAIPEGIPIETKILDLSKNRLKSVNPEEFISYPLLEEIDLSDNIIANVEPGAFNNLFNLRSLRLKGNRLKLVPLGVFTGLSNLTKLDISENKIVILLDYMFQDLHNLKSLEVGDNDLVYISHRAFSGLLSLEQLTLEKCNLTAVPTEALSHLRSLISLHLKHLNINNMPVYAFKRLFHLKHLEIDYWPLLDMMPANSLYGLNLTSLSVTNTNLSTVPFLAFKHLVYLTHLNLSYNPISTIEAGMFSDLIRLQELHIVGAQLRTIEPHSFQGLRFLRVLNVSQNLLETLEENVFSSPRALEVLSINNNPLACDCRLLWILQRQPTLQFGGQQPMCAGPDTIRERSFKDFHSTALSFYFTCKKPKIREKKLQHLLVDEGQTVQLECSADGDPQPVISWVTPRRRFITTKSNGRATVLGDGTLEIRFAQDQDSGMYVCIASNAAGNDTFTASLTVKGFASDRFLYANRTPMYMTDSNDTISNGTNANTFSLDLKTILVSTAMGCFTFLGVVLFCFLLLFVWSRGKGKHKNSIDLEYVPRKNNGAVVEGEVAGPRRFNMKMI

SEQ ID NO: 243 - DNA, 1494 bp, Homo Sapiens
  CDS (1)...(1494)
atgcttcacacggccatatcatgctggcagccattcctgggtctggctgtggtgttaatcttcatgggatccaccattggctgccccgctcgctgtgagtgctctgcccagaacaaatctgttagctgtcacagaaggcgattgatcgccatcccagagggcattcccatcgaaaccaaaatcttggacctcagtaaaaacaggctaaaaagcgtcaaccctgaagaattcatatcatatcctctgctggaagagatagacttgagtgacaacatcattgccaatgtggaaccaggagcattcaacaatctctttaacctgcgttccctccgcctaaaaggcaatcgtctaaagctggtccctttgggagtattcacggggctgtccaatctcactaagcttgacattagtgagaataagattgtcattttactagactacatgttccaagatctacataacctgaagtctctagaagtgggggacaatgatttggtttatatatcacacagggcattcagtgggcttcttagcttggagcagctcaccctggagaaatgcaacttaacagcagtaccaacagaagccctctcccacctccgcagcctcatcagcctgcatctgaagcatctcaatatcaacaatatgcctgtgtatgcctttaaaagattgttccacctgaaacacctagagattgactattggcctttactggatatgatgcctgccaatagcctctacggtctcaacctcacatccctttcagtcaccaacaccaatctgtctactgtacccttccttgcctttaaacacctggtatacctgactcaccttaacctctcctacaatcccatcagcactattgaagcaggcatgttctctgacctgatccgccttcaggagcttcatatagtgggggcccagcttcgcaccattgagcctcactccttccaagggctccgcttcctacgcgtgctcaatgtgtctcagaacctgctggaaactttggaagagaatgtcttctcctcccctagggctctggaggtcttgagcattaacaacaaccctctggcctgtgactgccgccttctctggatcttgcagcgacagcccaccctgcagtttggtggccagcaacctatgtgtgctggcccagacaccatccgtgagaggtctttcaaggatttccatagcactgccctttctttttactttacctgcaaaaaacccaaaatccgtgaaaagaagttgcagcatctgctagtagatgaagggcagacagtccagctagaatgcagtgcagatggagacccgcagcctgtgatttcctgggtgacaccccgaagcgtttcatcaccaccaagtccaatggaagagccaccgtgttgggtgatggcaccttggaaatccgctttgcccaggatcaagacagcgggatgtatgtttgcatcgctagcaatgctgctgggaatgataccttcacagcctccttaa

SEQ ID NO: 244 - protein, 497 aa, Homo Sapiens
MLHTAISCWQPFLGLAVVLIFMGSTIGCPARCECSAQNKSVSCHRRRLIAIPEGIPIETKILDLSKNRLKSVNPEEFISYPLLEEIDLSDNIIANVEPGAFNNLFNLRSLRLKGNRLKLVPLGVFTGLSNLTKLDISENKIVILLDYMFQDLHNLKSLEVGDNDLVYISHRAFSGLLSLEQLTLEKCNLTAVPTEALSHLRSLISLHLKHLNINNMPVYAFKRLFHLKHLEIDYWPLLDMMPANSLYGLNLTSLSVTNTNLSTVPFLAFKHLVYLTHLNLSYNPISTIEAGMFSDLIRLQELHIVGAQLRTIEPHSFQGLRFLRVLNVSQNLLETLEENVFSSPRALEVLSINNNPLACDCRLLWILQRQPTLQFGGQQPMCAGPDTIRERSFKDFHSTALSFYFTCKKPKIREKKLQHLLVDEGQTVQLECSADGDPQPVISWVTPRSVSSPPSPMEEPPCWVMAPWKSALPRIKTAGCMFASLAMLLGMIPSQPP

SEQ ID NO: 245 - DNA, 1908 bp, Homo Sapiens
  CDS (1)...(1908)
atggccccgccgctcctgctgctgctgctggccagtggagcggccgcctgcccgctgccctgcgtctgccagaacctgtccgagtcgctcagcaccctctgtgcccaccgaggcctgctgtttgtgccgcccaacgtggaccggcgcacagtggagctgcggctggctgacaacttcatccaggccctggggccccctgacttccgcaacatgacgggactggtggacctgacactgtctcgcaatgccatcacccgcattggggcccgcgcctttggggacctcgagagcctgcgttccctccaccttgacggcaacaggctggtggagctgggcaccgggagcctccggggccccgtcaatctgcagcacctcatcctcagcggcaaccagctgggccgcatcgcgccgggagccttcgacgacttcctagagagcctggaggacctggacctgtcctacaacaacctccggcaggtgccctgggccggcatcggcgccatgcctgccctgcacaccctcaacctggaccataaccttattgacgcactgcccccaggcgccttcgcccagctcggtcagctctcccgcctggacctcacctccaaccgcctggccacgctggctccggacccgcttttctctcgtgggcgtgatgcagaggcctctcccgcccccctggtgctgagctttagcgggaaccccctgcactgcaactgtgagctgctgtggctgcggcggctggcgcggccggacgacctggaaacgtgcgcctccccgcccggcctggccggccgctacttctgggcagtgcccgagggcgagttctcctgtgagccgcccctcattgcccgccacacgcagcgcctctgggtgctggaaggccagcgggccacgctgcggtgccgggccctgggtgaccccgcgcctaccatgcactgggtcggtcctgacgaccggttggttggcaactcctcccgagcccgggctttccccaacgggaccttagagattggggtgaccggcgctggggacgctgggggctacacctgcatcgccaccaaccctgctggtgaggccacagcccgagtagaactgcgggtgctggccttgccccatggtgggaacagcagtgccgaggggggccgccccgggccctcggacatcgccgcctccgctcgcactgctgccgagggtgaggggacgctggagtctgagccagccgtgcaggtgacggaggtgaccgccacctcagggctggtgagctggggtcccgggcggccagccgacccagtgtggatgttccaaatccagtacaacagcagcgaagatgagaccctcatctaccggattgtcccagcctccagccaccacttcctgctgaagcacctcgtccccggcgctgactatgacctctgcctgctggccttgtcaccggccgctgggccctctgacctcacggccaccaggctgctgggctgtgcccatttctccacgctgccggcctcgcccctgtgccacgccctgcaggcccacgtgctgggcgggaccctgaccgtggccgtggggggtgtgctggtggctgccttactggtcttcactgtggccttgctggttcggggccggggggccggaaatggccgcctccccctcaagctcagccacgtccagtcccagaccaatggaggccccagccccacacccaaggcccacccgccgcggagccccccgccccggccgcagcgcagctgctctctggacctgggagatgccgggtgctacggttatgccaggcgcctgggaggagcttgggcccgacggagccactctgtgcatggggggctgctcggggcagggtgccggggggtaggaggcagcgccgagcggctggaagagagtgtggtgtga

SEQ ID NO: 246 - protein, 635 aa, Homo Sapiens
MAPPLLLLLLASGAAACPLPCVCQNLSESLSTLCAHRGLLFVPPNVDRRTVELRLADNFIQALGPPDFRNMTGLVDLTLSRNAITRIGARAFGDLESLRSLHLDGNRLVELGTGSLRGPVNLQHLILSGNQLGRIAPGAFDDFLESLEDLDLSYNNLRQVPWAGIGAMPALHTLNLDHNLIDALPPGAFAQLGQLSRLDLTSNRLATLAPDPLFSRGRDAEASPAPLVLSFSGNPLHCNCELLWLRRLARPDDLETCASPPGLAGRYFWAVPEGEFSCEPPLIARHTQRLWVLEGQRATLRCRALGDPAPTMHWVGPDDRLVGNSSRARAFPNGTLEIGVTGAGDAGGYTCIATNPAGEATARVELRVLALPHGGNSSAEGGRPGPSDIAASARTAAEGEGTLESEPAVQVTEVTATSGLVSWGPGRPADPVWMFQIQYNSSEDETLIYRIVPASSHHFLLKHLVPGADYDLCLLALSPAAGPSDLTATRLLGCAHFSTLPASPLCHALQAHVLGGTLTVAVGGVLVAALLVFTVALLVRGRGAGNGRLPLKLSHVQSQTNGGPSPTPKAHPPRSPPPRPQRSCSLDLGDAGCYGYARRLGGAWARRSHSVHGGLLGAGCRGVGGSAERLEESVV

SEQ ID NO: 247 - DNA, 2518 bp, Homo Sapiens
cgattcctggggacgcctgggaaaggaagttccgggaccctccctgctctcggtcctcctccgcttcctgcctcatgcctcaccttgtccccagcgcctggactcccccttaactgcttgggaaatgtgacctttgctctggggggcctggccctgcaggccccaaccttccctcatctctggcggccctcttgggcctctgacccagcccctccccgggccaggctcacagaagctggcttctgggactgtcctgggcccaagtgggcacctgcgccagccccacctgtgcctgggctgtggccccttcctacagggcgctcaccatggccccgccgctcctgctgctgctgctggccagtggagcggccgcctgcccgctgccctgcgtctgccagaacctgtccgagtcgctcagcaccctctgtgcccaccgaggcctgctgtttgtgccgcccaacgtggaccggcgcacagtggagctgcggctggctgacaacttcatccaggccctggggccccctgacttccgcaacatgacgggactggtggacctgacactgtctcgcaatgccatcacccgcattggggcccgcgcctttggggacctcgagagcctgcgttccctccaccttgacggcaacaggctggtggagctgggcaccgggagcctccggggccccgtcaatctgcagcacctcatcctcagcggcaaccagctgggccgcatcgcgccgggagccttcgacgacttcctagagagcctggaggacctggacctgtcctacaacaacctccggcaggtgccctgggccggcatcggcgccatgcctgccctgcacaccctcaacctggaccataaccttattgacgcactgcccccaggcgccttcgcccagctcggtcagctctcccgcctggacctcacctccaaccgcctggccacgctggctccggacccgcttttctctcgtgggcgtgatgcagaggcctctcccgcccccctggtgctgagctttagcgggaaccccctgcactgcaactgtgagctgctgtggctgcggcggctggcgcggccggacgacctggaaacgtgcgcctccccgcccggcctggccggccgctacttctgggcagtgcccgagggcgagttctcctgtgagccgcccctcattgcccgccacacgcagcgcctctgggtgctggaaggccagcgggccacgctgcggtgccgggccctgggtgaccccgcgcctaccatgcactgggtcggtcctgacgaccggttggttggcaactcctcccgagcccgggctttccccaacgggaccttagagattggggtgaccggcgctggggacgctgggggctacacctgcatcgccaccaaccctgctggtgaggccacagcccgagtagaactgcgggtgctggccttgccccatggtgggaacagcagtgccgaggggggccgccccgggccctcggacatcgccgcctccgctcgcactgctgccgagggtgaggggacgctggagtctgagccagccgtgcaggtgacggaggtgaccgccacctcagggctggtgagctggggtcccgggcggccagccgacccagtgtggatgttccaaatccagtacaacagcagcgaagatgagaccctcatctaccggattgtcccagcctccagccaccacttcctgctgaagcacctcgtccccggcgctgactatgacctctgcctgctggccttgtcaccggccgctgggccctctgacctcacggccaccaggctgctgggctgtgcccatttctccacgctgccggcctcgcccctgtgccacgccctgcaggcccacgtgctgggcgggaccctgaccgtggccgtggggggtgtgctggtggctgccttactggtcttcactgtggccttgctggttcggggccggggggccggaaatggccgcctccccctcaagctcagccacgtccagtcccagaccaatggaggccccagccccacacccaaggcccacccgccgcggagccccccgccccggccgcagcgcagctgctctctggacctgggagatgccgggtgctacggttatgccaggcgcctgggaggagcttgggcccgacggagccactctgtgcatggggggctgctcggggcagggtgccggggggtaggaggcagcgccgagcggctggaagagagtgtggtgtgatggacgggcagcttcctgtgtgctccaagggatgagcctcgtggggcagagggcccggggccgccgcctggcctgggagtccctccctggtttttattctcagtacctcaggctcccctgtgtacttggaggggcagggagccctttcctcggttctggcctccagaccagggtaagggcaggcccctccaacaggtgctcacagccaccgaggcaggggctgcagccacccactgggagtcttgtttttatttataataaaattgttggggacammwmaaaaa

SEQ ID NO: 248 - DNA, 6816 bp, Homo Sapiens
  CDS (1)...(6816)
atgactgcctggctgatctctctgatgagtattgaagtactacttttggcagtacgtcacctgagtttacatattgaacctgaagaaggtagccttgcagggggaacgtggatcacagtcatttttgatggtttggagttgggtgttctttaccccaacaatggctctcaattggagatacacctggtgaacgtgaacatggtggtgcccgcactgcggagtgttccctgtgacgtctttcctgttttcttggatttgcctgtggtgacatgccggaccagatctgtgctgtctgaagcacatgagggtctgtacttcctggaagcatacttcgggggacagctggtaagcagtccaaatccaggaccacgagatagctgtactttcaagttttccaaggcgcagacacccatcgttcaccaagtttatccaccaagtggtgttccaggaaaactaatacatgtatatggctggattatcactggaagattggaaacttttgattttgatgctgagtacattgatagcccagtgatcttggaagctcaaggagacaaatgggttactccttgctctcttataaataggcagatgggaagctgttatcctattcaggaggaccatggtcttgggactctgcagtgccatgtggaaggcgactacatcggctcccagaatgttagcttctcagtatttaacaaaggaaagtcaatggtccacaagaaggcatggctgatcagtgctaaacaggatcttttcctataccagacacactcagaaatattatctgtgtttccagaaactgggagccttgggggaagaacaaacatcacaattacaggagacttttttgacaattctgcccaggttaccattgcaggcattccatgtgatattagacacgtgtctcccaggaagattgagtgcaccactcgggctccaggaaaagatgtgaggctcaccacccctcagccaggcaatcgagggcttctttttgaagttggagatgctgttgagggactggaactgactgaagccaccccagggtacaggtggcagattgtccctaatgccagttctccatttgggttttggtcacaggaaggacaacctttcagagcacggctcagtgggttctttgtggctccagagacaaataattacactttctggattcaggcagatagccaagcttccttgcatttcagttggtcagaggaaccaaggactaaggtgaaagtggcctccatcagcgtcggcactgctgactggtttgactcctgggagcagaatagggatgaagggacctggcagcagaagactcccaagttggagctgttgggtggagccatgtactacctggaagcagagcatcatgggatagccccaagcagggggatgaggattggtgtccagattcacaacacctggctgaatcctgatgtggtcaccacttacctacgggagaagcaccagatccgagtccgagcccagaggcttccagaagtacaggtgctgaatgtatcaggcagaggaaacttcttccttacttgggacaatgtctctagtcagccaatccctgcaaatgccacagcccatctgattcaaacaaccattgaggagttacttgcagtaaaatgcaaactggaacccctttggtctaacatccttctccggcttggatttgaacgaggcccagaagtttccaactctgatggggacctcaccagtgggacggagcccttctgtggcaggttcagcctccgtcagcctcgacaccttgtccttactcccccggctgcccagaagggctatcggctagatcagtatacacacctgtgtcttgcatacaaaggccacatgaacaagatcctgaagatgattgtgtccttcacaatcggctttcaaaacatggtaaagaataccacctgtgactggagtctcacgaggaccagccccgagagctggcagttcgattgcactgacctctgggagacttgtgtgcgttgcttcggggatctccagccccctccggcaaactccccagtgctggttcatcagatcaaccttctccctctggcccaggagacgggcctgttctatgtggatgaaattattattgcagacacaaacgtaacagtttctcaagctgattctggaacggctcgcccagggggcaatctggtggaatcagtctctgtggtgggatcccctccggtctacagtgtcacctcctggctggcggggtgtggcacggagctcccgctcatcactgcacgctctgtgcccactgaaggaacagaagagggatctggactggtcctggtgacgacacagagacgacagcggacaagtccacctctaggaggacactttcgcatccagcttcctaatacagtgatttctgatgtccctgtacaaatttctgctcatcaccttcaccagctcttacagaataatgccgatgacttcacatccaggtacctcaatgccagtgacttcactgtgaaggaggatctatacacttgctacgaacacgtgtggaccttgtcctggtccactcagattggggatttgcccaattttatcagggtctctgatgaaaaccttactggagtgaatcctgctgcagccacgcgtgtggtatatgatggtggagtttttcttggacccatatttggagacatgttggctactgccaaccagcatactcaggtggttgtgcgagtgaatgatgtaccagctcattgcccaggttcctgctctttccagtacctccaagggtcaactccctgtgtccattctgtgtggtactccattgatggtgacatcaacctaatgatttacattaccggaactggtttctctggtgactcccagttcttgcaggttacagtgaacaaaacgagttgcaaagttattttctcaaaccagaccaatgtagtctgtcagacagatttgctacctgttggaatgcatcggatcttgatgttggtgagaccctctggtcttgccatcagtgccactggagaagacctcttcctaaatgtgaaacctagactggatatggtggagccttccagagctgcggatattggagggctctgggccaccatccgaggctctagtttggaaggtgttagcctgatattatttggatcttactcgtgtgccatcaatgtcgctacaagcaattcaagcagaattcagtgcaaagttccacccagggggaaagatggacgcattgtgaatgtgactgtgatcagaggggactattctgcagttcttcccagagcatttacatatgtctcttccttaaatccagttattgtgactctgagcagaaacataagcaatatagcaggcggtgagaccctggtcattggagtggcgaggctgatgaactatacggatttggatgtggaagtccacgtccaggatgccttggctccggttcacacacagtcggcttggggcctggaggtggcactgcccccactgccagctggtctccacagaatttccgtctctatcaatggggtcagcattcactcacaaggggttgatctccacatccagtacctcacagaagttttcagcatcgagccttgctgtgggtccctgctgggagggaccatcctcagcatctcaggaataggcttcagcagggacccagctttggtttgggtacttgtgggcaatcggtcctgtgacattgtgaacttaacggaggcgagcatctggtgtgaaaccctgccagccccccagatacccgatgcgggcgctcccactgttccagctgccgtggaggtctgggctggcaacaggttcttcgcccgtggtccttcaccaagcttggtggggaaaggcttcaccttcatgtatgaagcggcagcaacaccagtagtcactgccatgcaaggagaaatcacaaatagcagcctgagcctgcatgtgggaggaagtaacctctccaactcagtcatccttctggggaacctgaactgtgatgttgagacacagtccttccagggcaacgtgagcctgtctggatgctccatccctcttcacagtctggaggctggcatctatcctctccaagtacgtcagaagcagatgggatttgctaatatgtctgtggtgctccagcaatttgcagtgatgcctcggataatggccatcttcccatcgcagggttcggcatgtggtgggaccatacttactgtgagggggttgcttcttaactctagaaggaggtcagttcgggttgacctctcgggtccttttacttgtgtgattttgagtttgggagaccacaccattctctgccaggttagcctggagggtgaccccttgcctggagcttccttctccctgaacgtcacagtcctggtcaatgggctaaccagcgagtgtcaggggaattgcactcttttcataagggaagaggcaagtcctgtcatggatgccttgtccacaaacaccagtgggtctctgaccactgtgctgattaggggtcagaggttagccaccacagctgatgagccgatggtatttgtggatgatcaacttccttgcaatgtaactttttttaatgcaagccacgttgtgtgccagacaagagacttggccccaggaccccactacctgtcagttttttatacaagaaatgggtatgcttgttctggtaatgtttccagacacttctacattatgccccaagtgtttcattattttcctaagaatttcagcttacatggtggaagcctcttgaccatagagggcacaggcctgagaggacagaacaccacgtcagtctatattgaccagcagacctgcctgacggtgaacatcggtgctgagctcatccggtgcattgttcccacagggaatggctctgttgccctggaaatagaggtagatggactttggtatcacataggagtcattggttataacaaggcctttaccccagaattgatctctatttctcagagcgatgacatcttaacctttgcagtggcccagatctcaggagctgcaaacattgacatttttataggaatgtcaccctgtgtgggtgtctctggtaaccacaccgttcttcagtgcgtggtcccttcccttccggccggggagtaccacgtcagaggctatgactgcatcagagggtgggcctcatctgccctggtgttcacctcaagagttattattacagcagtgacggagaacttcggctgcctgggtggaaggctggtgcatgtgtttggagcgggattttctccagggaatgtctcagctgctgtgtgtggtgctccctgccgagtcctggctaatgctacagtgtctgccttcagctgcttggttctgcccctggatgtgtccttggccttcctgtgtggcctgaagcgtgaggaggacagctgtgaggctgccagacacacctatgtgcagtgtgatttgacagttgccatggcgacagagcaactgcttgaatcgtggccttacctctacatttgcgaggaaagttcccaatgcctctttgtgccagatcattgggcagagtcaatgtttccatcattctcgggcctctttatcagccctaaagtggaaagagatgaagttctcatctataatagctcctgtaacattaccatggaaactgaggcagagatggagtgtgagacgcccaatcagccaattaccgtcaagattactgagatacggaaacgctggggccagaacactcagggcaacttttctttacagttctgccggagatggtccaggactcacagctggtttcctgaaaggctgccacaagatggcgacaacgtcacagtggagaatggccaattgcttctgctggacactaacacaagcatcctcaacttactgcacattaaagggggcaagctgattttcatggccccaggacccatcgagctcagggcacacgccatccttgtttctgatggtggagagctccggattggatccgaagacaagcccttccaaggcagagctcagatcacactctacgggagttcctactcaactcccttctttccctatggagtcaagttcctggctgtgaggaatggaactctttctctgcacggttcactaccagaagtaattgtcacctgtcttagagcaactgcccatgccctagacacagtgctggctttagaagatgctgtggactggaaccctggggatgaagttgtcatcatcagtggaacaggtgttaaaggtgccaaaccgatggaagagattgtcactgtggaaactgtgcaggatacagacctctatcttaagtcacctttgagatattctcacaactttacagagaattgggtggctggagagcaccatattttaaaggccactgtggctctgctcagcaggagtattaccatacaaggaaatctcactaatgagagggagaagctgcttgtttcatgccaggaggccaatgctccagaaggtaatctgcagcactgtttgtattccatgagtgagaagatgctaggatccagggatatgggagccagagtgatcgttcagtccttcccagaagagcccagccaggtccagttgaagggagtgcagtttcaagtcttggggcaagccttccataagcatctgagctcactcactctggtgggagctatgagagagtctttcatacagggctgcacagtgaggaactccttcagtagaggcctcagcatgtgcgggaccttgggcctgaaggtggacagtaatgtattctacaatattttaggtcatgcgctgctagttggtaagtaa

SEQ ID NO: 249 - protein, 2271 aa, Homo Sapiens
MTAWLISLMSIEVLLLAVRHLSLHIEPEEGSLAGGTWITVIFDGLELGVLYPNNGSQLEIHLVNVNMVVPALRSVPCDVFPVFLDLPVVTCRTRSVLSEAHEGLYFLEAYFGGQLVSSPNPGPRDSCTFKFSKAQTPIVHQVYPPSGVPGKLIHVYGWIITGRLETFDFDAEYIDSPVILEAQGDKWVTPCSLINRQMGSCYPIQEDHGLGTLQCHVEGDYIGSQNVSFSVFNKGKSMVHKKAWLISAKQDLFLYQTHSEILSVFPETGSLGGRTNITITGDFFDNSAQVTIAGIPCDIRHVSPRKIECTTRAPGKDVRLTTPQPGNRGLLFEVGDAVEGLELTEATPGYRWQIVPNASSPFGFWSQEGQPFRARLSGFFVAPETNNYTFWIQADSQASLHFSWSEEPRTKVKVASISVGTADWFDSWEQNRDEGTWQQKTPKLELLGGAMYYLEAEHHGIAPSRGMRIGVQIHNTWLNPDVVTTYLREKHQIRVRAQRLPEVQVLNVSGRGNFFLTWDNVSSQPIPANATAHLIQTTIEELLAVKCKLEPLWSNILLRLGFERGPEVSNSDGDLTSGTEPFCGRFSLRQPRHLVLTPPAAQKGYRLDQYTHLCLAYKGHMNKILKMIVSFTIGFQNMVKNTTCDWSLTRTSPESWQFDCTDLWETCVRCFGDLQPPPANSPVLVHQINLLPLAQETGLFYVDEIIIADTNVTVSQADSGTARPGGNLVESVSVVGSPPVYSVTSWLAGCGTELPLITARSVPTEGTEEGSGLVLVTTQRRQRTSPPLGGHFRIQLPNTVISDVPVQISAHHLHQLLQNNADDFTSRYLNASDFTVKEDLYTCYEHVWTLSWSTQIGDLPNFIRVSDENLTGVNPAAATRVVYDGGVFLGPIFGDMLATANQHTQVVVRVNDVPAHCPGSCSFQYLQGSTPCVHSVWYSIDGDINLMIYITGTGFSGDSQFLQVTVNKTSCKVIFSNQTNVVCQTDLLPVGMHRILMLVRPSGLAISATGEDLFLNVKPRLDMVEPSRAADIGGLWATIRGSSLEGVSLILFGSYSCAINVATSNSSRIQCKVPPRGKDGRIVNVTVIRGDYSAVLPRAFTYVSSLNPVIVTLSRNISNIAGGETLVIGVARLMNYTDLDVEVHVQDALAPVHTQSAWGLEVALPPLPAGLHRISVSINGVSIHSQGVDLHIQYLTEVFSIEPCCGSLLGGTILSISGIGFSRDPALVWVLVGNRSCDIVNLTEASIWCETLPAPQIPDAGAPTVPAAVEVWAGNRFFARGPSPSLVGKGFTFMYEAAATPVVTAMQGEITNSSLSLHVGGSNLSNSVILLGNLNCDVETQSFQGNVSLSGCSIPLHSLEAGIYPLQVRQKQMGFANMSVVLQQFAVMPRIMAIFPSQGSACGGTILTVRGLLLNSRRRSVRVDLSGPFTCVILSLGDHTILCQVSLEGDPLPGASFSLNVTVLVNGLTSECQGNCTLFIREEASPVMDALSTNTSGSLTTVLIRGQRLATTADEPMVFVDDQLPCNVTFFNASHVVCQTRDLAPGPHYLSVFYTRNGYACSGNVSRHFYIMPQVFHYFPKNFSLHGGSLLTIEGTGLRGQNTTSVYIDQQTCLTVNIGAELIRCIVPTGNGSVALEIEVDGLWYHIGVIGYNKAFTPELISISQSDDILTFAVAQISGAANIDIFIGMSPCVGVSGNHTVLQCVVPSLPAGEYHVRGYDCIRGWASSALVFTSRVIITAVTENFGCLGGRLVHVFGAGFSPGNVSAAVCGAPCRVLANATVSAFSCLVLPLDVSLAFLCGLKREEDSCEAARHTYVQCDLTVAMATEQLLESWPYLYICEESSQCLFVPDHWAESMFPSFSGLFISPKVERDEVLIYNSSCNITMETEAEMECETPNQPITVKITEIRKRWGQNTQGNFSLQFCRRWSRTHSWFPERLPQDGDNVTVENGQLLLLDTNTSILNLLHIKGGKLIFMAPGPIELRAHAILVSDGGELRIGSEDKPFQGRAQITLYGSSYSTPFFPYGVKFLAVRNGTLSLHGSLPEVIVTCLRATAHALDTVLALEDAVDWNPGDEVVIISGTGVKGAKPMEEIVTVETVQDTDLYLKSPLRYSHNFTENWVAGEHHILKATVALLSRSITIQGNLTNEREKLLVSCQEANAPEGNLQHCLYSMSEKMLGSRDMGARVIVQSFPEEPSQVQLKGVQFQVLGQAFHKHLSSLTLVGAMRESFIQGCTVRNSFSRGLSMCGTLGLKVDSNVFYNILGHALLVGK

SEQ ID NO: 250 - DNA, 3000 bp, Homo Sapiens
  CDS (1)...(3000)
atgactgcctggctgatctctctgatgagtattgaagtactacttttggcagtacgtcacctgagtttacatattgaacctgaagaaggtagccttgcagggggaacgtggatcacagtcatttttgatggtttggagttgggtgttctttaccccaacaatggctctcaattggagatacacctggtgaacgtgaacatggtggtgcccgcactgcggagtgttccctgtgacgtctttcctgttttcttggatttgcctgtggtgacatgccggaccagatctgtgctgtctgaagcacatgagggtctgtacttcctggaagcatacttcgggggacagctggtaagcagtccaaatccaggaccacgagatagctgtactttcaagttttccaaggcgcagacacccatcgttcaccaagtttatccaccaagtggtgttccaggaaaactaatacatgtatatggctggattatcactggaagattggaaacttttgattttgatgctgagtacattgatagcccagtgatcttggaagctcaaggagacaaatgggttactccttgctctcttataaataggcagatgggaagctgttatcctattcaggaggaccatggtcttgggactctgcagtgccatgtggaaggcgactacatcggctcccagaatgttagcttctcagtatttaacaaaggaaagtcaatggtccacaagaaggcatggctgatcagtgctaaacaggatcttttcctataccagacacactcagaaatattatctgtgtttccagaaactgggagccttgggggaagaacaaacatcacaattacaggagacttttttgacaattctgcccaggttaccattgcaggcattccatgtgatattagacacgtgtctcccaggaagattgagtgcaccactcgggctccaggaaaagatgtgaggctcaccacccctcagccaggcaatcgagggcttctttttgaagttggagatgctgttgagggactggaactgactgaagccaccccagggtacaggtggcagattgtccctaatgccagttctccatttgggttttggtcacaggaaggacaacctttcagagcacggctcagtgggttctttgtggctccagagacaaataattacactttctggattcaggcagatagccaagcttccttgcatttcagttggtcagaggaaccaaggactaaggtgaaagtggcctccatcagcgtcggcactgctgactggtttgactcctgggagcagaatagggatgaagggacctggcagcagaagactcccaagttggagctgttgggtggagccatgtactacctggaagcagagcatcatgggatagccccaagcagggggatgaggattggtgtccagattcacaacacctggctgaatcctgatgtggtcaccacttacctacgggagaagcaccagatccgagtccgagcccagaggcttccagaagtacaggtgctgaatgtatcaggcagaggaaacttcttccttacttgggacaatgtctctagtcagccaatccctgcaaatgccacagcccatctgattcaaacaaccattgaggagttacttgcagtaaaatgcaaactggaacccctttggtctaacatccttctccggcttggatttgaacgaggcccagaagtttccaactctgatggggacctcaccagtgggacggagcccttctgtggcaggttcagcctccgtcagcctcgacaccttgtccttactcccccggctgcccagaagggctatcggctagatcagtatacacacctgtgtcttgcatacaaaggccacatgaacaagatcctgaagatgattgtgtccttcacaatcggctttcaaaacatggtaaagaataccacctgtgactggagtctcacgaggaccagccccgagagctggcagttcgattgcactgacctctgggagacttgtgtgcgttgcttcggggatctccagccccctccggcaaactccccagtgctggttcatcagatcaaccttctccctctggcccaggagacgggcctgttctatgtggatgaaattattattgcagacacaaacgtaacagtttctcaagctgattctggaacggctcgcccagggggcaatctggtggaatcagtctctgtggtgggatcccctccggtctacagtgtcacctcctggctggcggggtgtggcacggagctcccgctcatcactgcacgctctgtgcccactgaaggaacagaagagggatctggactggtcctggtgacgacacagagacgacagcggacaagtccacctctaggaggacactttcgcatccagcttcctaatacagtgatttctgatgtccctgtacaaatttctgctcatcaccttcaccagctcttacagaataatgccgatgacttcacatccaggtacctcaatgccagtgacttcactgtgaaggaggatctatacacttgctacgaacacgtgtggaccttgtcctggtccactcagattggggatttgcccaattttatcagggtctctgatgaaaaccttactggagtgaatcctgctgcagccacgcgtgtggtatatgatggtggagtttttcttggacccatatttggagacatgttggctactgccaaccagcatactcaggtggttgtgcgagtgaatgatgtaccagctcattgcccaggttcctgctctttccagtacctccaagggtcaactccctgtgtccattctgtgtggtactccattgttcttgcaggttacagtgaacaaaacgagttgcaaagttattttctcaaaccagaccaatgtagtctgtcagacagatttgctacctgttggaatgcatcggatcttgatgttggtgagaccctctggtcttgccatcagtgccactggagaagacctcttcctaaatgtgaaacctag

SEQ ID NO: 251 - protein, 999 aa, Homo Sapiens
MTAWLISLMSIEVLLLAVRHLSLHIEPEEGSLAGGTWITVIFDGLELGVLYPNNGSQLEIHLVNVNMVVPALRSVPCDVFPVFLDLPVVTCRTRSVLSEAHEGLYFLEAYFGGQLVSSPNPGPRDSCTFKFSKAQTPIVHQVYPPSGVPGKLIHVYGWIITGRLETFDFDAEYIDSPVILEAQGDKWVTPCSLINRQMGSCYPIQEDHGLGTLQCHVEGDYIGSQNVSFSVFNKGKSMVHKKAWLISAKQDLFLYQTHSEILSVFPETGSLGGRTNITITGDFFDNSAQVTIAGIPCDIRHVSPRKIECTTRAPGKDVRLTTPQPGNRGLLFEVGDAVEGLELTEATPGYRWQIVPNASSPFGFWSQEGQPFRARLSGFFVAPETNNYTFWIQADSQASLHFSWSEEPRTKVKVASISVGTADWFDSWEQNRDEGTWQQKTPKLELLGGAMYYLEAEHHGIAPSRGMRIGVQIHNTWLNPDVVTTYLREKHQIRVRAQRLPEVQVLNVSGRGNFFLTWDNVSSQPIPANATAHLIQTTIEELLAVKCKLEPLWSNILLRLGFERGPEVSNSDGDLTSGTEPFCGRFSLRQPRHLVLTPPAAQKGYRLDQYTHLCLAYKGHMNKILKMIVSFTIGFQNMVKNTTCDWSLTRTSPESWQFDCTDLWETCVRCFGDLQPPPANSPVLVHQINLLPLAQETGLFYVDEIIIADTNVTVSQADSGTARPGGNLVESVSVVGSPPVYSVTSWLAGCGTELPLITARSVPTEGTEEGSGLVLVTTQRRQRTSPPLGGHFRIQLPNTVISDVPVQISAHHLHQLLQNNADDFTSRYLNASDFTVKEDLYTCYEHVWTLSWSTQIGDLPNFIRVSDENLTGVNPAAATRVVYDGGVFLGPIFGDMLATANQHTQVVVRVNDVPAHCPGSCSFQYLQGSTPCVHSVWYSIVLAGYSEQNELQSYFLKPDQCSLSDRFATCWNASDLDVGETLWSCHQCHWRRPLPKCET

SEQ ID NO: 252 - DNA, 6804 bp, Homo Sapiens
  CDS (1)...(6804)
atgactgcctggctgatctctctgatgagtattgaagtactacttttggcagtacgtcacctgagtttacatattgaacctgaagaaggtagccttgcagggggaacgtggatcacagtcatttttgatggtttggagttgggtgttctttaccccaacaatggctctcaattggagatacacctggtgaacgtgaacatggtggtgcccgcactgcggagtgttccctgtgacgtctttcctgttttcttggatttgcctgtggtgacatgccggaccagatctgtgctgtctgaagcacatgagggtctgtacttcctggaagcatacttcgggggacagctggtaagcagtccaaatccaggaccacgagatagctgtactttcaagttttccaaggcgcagacacccatcgttcaccaagtttatccaccaagtggtgttccaggaaaactaatacatgtatatggctggattatcactggaagattggaaacttttgattttgatgctgagtacattgatagcccagtgatcttggaagctcaaggagacaaatgggttactccttgctctcttataaataggcagatgggaagctgttatcctattcaggaggaccatggtcttgggactctgcagtgccatgtggaaggcgactacatcggctcccagaatgttagcttctcagtatttaacaaaggaaagtcaatggtccacaagaaggcatggctgatcagtgctaaacaggatcttttcctataccagacacactcagaaatattatctgtgtttccagaaactgggagccttgggggaagaacaaacatcacaattacaggagacttttttgacaattctgcccakgttaccattgcaggcattccatgtgatattagacacgtgtctcccaggaagattgagtgcaccactcgggctccaggaaaagatgtgaggctcaccacccctcagccaggcaatcgagggcttctttttgaagttggagatgctgttgagggactggaactgactgaagccaccccagggtacaggtggcagattgtccctaatgccagttctccatttgggttttggtcacaggaaggacaacctttcagagcacggctcagtgggttctttgtggctccagagacaaataattacactttctggattcaggcagatagccaagcttccttgcatttcagttggtcagaggaaccaaggactaaggtgaaagtggcctccatcagcgtcggcactgctgactggtttgactcctgggagcagaatagggatgaagggacctggcagcagaagactcccaagttggagctgttgggtggagccatgtactacctggaagcagagcatcatgggatagccccaagcagggggatgaggattggtgtccagattcacaacacctggctgaatcctgatgtggtcaccacttacctacgggagaagcaccagatccgagtccgagcccagaggcttccagaagtacaggtgctgaatgtatcaggcagaggaaacttcttccttacttgggacaatgtctctagtcagccaatccctgcaaatgccacagcccatctgattcaaacaaccattgaggagttacttgcagtaaaatgcaaactggaacccctttggtctaacatccttctccggcttggatttgaacgaggcccagaagtttccaactctgatggggacctcaccagtgggacggagcccttctgtggcaggttcagcctccgtcagcctcgacaccttgtccttactcccccggctgcccagaagggctatcggctagatcagtatacacacctgtgtcttgcatacaaaggccacatgaacaagatcctgaagatgattgtgtccttcacaatcggctttcaaaacatggtaaagaataccacctgtgactggagtctcacgaggaccagccccgagagctggcagttcgattgcactgacctctgggagacttgtgtgcgttgcttcggggatctccagccccctccggcaaactccccagtgctggttcatcagatcaaccttctccctctggcccaggagacgggcctgttctatgtggatgaaattattattgcagacacaaacgtaacagtttctcaagctgattctggaacggctcgcccagggggcaatctggtggaatcagtctctgtggtgggatcccctccggtctacagtgtcacctcctggctggcggggtgtggcacggagctcccgctcatcactgcacgctctgtgcccactgaaggaacagaagagggatctggactggtcctggtgacgacacagagacgacagcggacaagtccacctctaggaggacactttcgcatccagcttcctaatacagtgatttctgatgtccctgtacaaatttctgctcatcaccttcaccagctcttacagaataatgccgatgacttcacatccaggtacctcaatgccagtgacttcactgtgaaggaggatctatacacttgctacgaacacgtgtggaccttgtcctggtccactcagattggggatttgcccaattttatcagggtctctgatgaaaaccttactggagtgaatcctgctgcagccacgcgtgtggtatatgatggtggagtttttcttggacccatatttggagacatgttggctactgccaaccagcatactcaggtggttgtgcgagtgaatgatgtaccagctcattgcccaggttcctgctctttccagtacctccaagggtcaactccctgtgtccattctgtgtggtactccattgatggtgacatcaacctaatgatttacattaccggaactggtttctctggtgactcccagttcttgcaggttacagtgaacaaaacgagttgcaaagttattttctcaaaccagaccaatgtagtctgtcagacagatttgctacctgttggaatgcatcggatcttgatgttggtgagaccctctggtcttgccatcagtgccactggagaagacctcttcctaaatgtgaaacctagactggatatggtggagccttccagagctgcggatattggagggctctgggccaccatccgaggctctagtttggaaggtgttagcctgatattatttggatcttactcgtgtgccatcaatgtcgctacaagcaattcaagcagaattcagtgcaaagttccacccagggggaaagatggacgcattgtgaatgtgactgtgatcagaggggactattctgcagttcttcccagagcatttacatatgtctcttccttaaatccagttattgtgactctgagcagaaacataagcaatatagcaggcggtgagaccctggtcattggagtggcgaggctgatgaactatacggatttggatgtggaagtccacgtccaggatgccttggctccggttcacacacagtcggcttggggcctggaggtggcactgcccccactgccagctggtctccacagaatttccgtctctatcaatggggtcagcattcactcacaaggggttgatctccacatccagtacctcacagaagttttcagcatcgagccttgctgtgggtccctgctgggagggaccatcctcagcatctcaggaataggcttcagcagggacccagctttggtttsggtacttgtgggcaatcggtcctgtgacattgtgaacttaacggaggcgagcatctggtgtgaaaccctgccagccccccagatacccgatgcgggcgctcccactgttccagctgccgtggaggtctgggctggcaacaggttcttcgcccgtggtccttcaccaagcttggtggggaaaggcttcaccttcatgtatgaagcggcagcaacaccagtagtcactgccatgcaaggagaaatcacaaatagcagcctgagcctgcatgtgggaggaagtaacctctccaactcagtcatccttctggggaacctgaactgtgatgttgagacacagtccttccagggcaacgtgagcctgtctggatgctccatccctcttcacagtctggaggctggcatctatcctctccaagtacgtcagaagcagatgggatttgctaatatgtctgtggtgctccagcaatttgcagtgatgcctcggataatggccatcttcccatcgcagggttcggcatgtggtgggaccatacttactgtgagggggttgcttcttaactctagaaggaggtcagttcgggttgacctctcgggtccttttacttgtgtgattttgagtttgggagaccacaccattctctgccaggttagcctggagggtgaccccttgcctggagcttccttctccctgaacgtcacagtcctggtcaatgggctaaccagcgagtgtcaggggaattgcactcttttcataagggaagaggcaagtcctgtcatggatgccttgtccacaaacaccagtgggtctctgaccactgtgctgattaggggtcagaggttagccaccacagctgatgagccgatggtatttgtggatgatcaacttccttgcaatgtaactttttttaatgcaagccacgttgtgtgccagacaagagacttggccccaggaccccactacctgtcagttttttatacaagaaatgggtatgcttgttctggtaatgtttccagacacttctacattatgccccaagtgtttcattattttcctaagaatttcagcttacatggtggaagcctcttgaccatagagggcacaggcctgagaggacagaacaccacgtcagtctatattgaccagcagacctgcctgacggtgaacatcggtgctgagctcatccggtgcattgttcccacagggaatggctctgttgccctggaaatagaggtagatggactttggtatcacataggagtcattggttataacaaggcctttaccccagaattgatctctatttctcagagcgatgacatcttaacctttgcagtggcccagatctcaggagctgcaaacattgacatttttataggaatgtcaccctgtgtgggtgtctctggtaaccacaccgttcttcagtgcgtggtcccttcccttccggccggggagtaccacgtcagaggctatgactgcatcagagggtgggcctcatctgccctggtgttcacctcaagagttattattacagcagtgacggagaacttcggctgcctgggtggaaggctggtgcatgtgtttggagcgggattttctccagggaatgtctcagctgctgtgtgtggtgctccctgccgagtcctggctaatgctacagtgtctgccttcagctgcttggttctgcccctggatgtgtccttggccttcctgtgtggcctgaagcgtgaggaggacagctgtgaggctgccagacacacctatgtgcagtgtgatttgacagttgccatggcgacagagcaactgcttgaatcgtggccttacctctacatttgcgaggaaagttcccaatgcctctttgtgccagatcattgggcagagtcaatgtttccatcattctcgggcctctttatcagccctaaagtggaaagagatgaagttctcatctataatagctcctgtaacattaccatggaaactgaggcagagatggagtgtgagacgcccaatcagccaattaccgtcaagattactgagatacggaaacgctggggccagaacactcagggcaacttttctttacagttctgccggagatggtccaggactcacagctggtttcctgaaaggctgccacaagatggcgacaacgtcacagtggagaatggccaattgcttctgctggacactaacacaagcatcctcaacttactgcacattaaagggggcaagctgattttcatggccccaggacccatcgagctcagggcacacgccatccttgtttctgatggtggagagctccggattggatccgaagacaagcccttccaaggcagagctcagatcacactctacgggagttcctactcaactcccttctttccctatggagtcaagttcctggctgtgaggaatggaactctttctctgcacggttcactaccagaagtaattgtcacctgtcttagagcaactgcccatgccctagacacagtgctggctttagaagatgctgtggactggaaccctggggatgaagttgtcatcatcagtggaacaggtgttaaaggtgccaaaccgatggaagagattgtcactgtggaaactgtgcaggatacagacctctatcttaagtcacctttgagatattctcacaactttacagagaattgggtggctggagagcaccatattttaaaggccactgtggctctgctcagcaggagtattaccatacaaggaaatctcactaatgagagggagaagctgcttgtttcatgccaggaggccaatgctccagaaggtaatctgcagcactgtttgtattccatgagtgagaagatgctaggatccagggatatgggagccagagtgatcgttcagtccttcccagaagagcccagccaggtccagttgaagggagtgcagtttcaagtcttggggcaagccttccataagcatctgagctcactcactctggtgggagctatgagagagtctttcatacagggctgcacagtgaggaactccttcagtagaggcctcagcatgtgcgggaccttgggcctgaaggtggacagtaatgtattctacaatattttaggtcatgcgctctag

SEQ ID NO: 253 - protein, 2267 aa, Homo Sapiens
  VARIANT 289, 1229: Xaa = Any Amino Acid
MTAWLISLMSIEVLLLAVRHLSLHIEPEEGSLAGGTWITVIFDGLELGVLYPNNGSQLEIHLVNVNMVVPALRSVPCDVFPVFLDLPVVTCRTRSVLSEAHEGLYFLEAYFGGQLVSSPNPGPRDSCTFKFSKAQTPIVHQVYPPSGVPGKLIHVYGWIITGRLETFDFDAEYIDSPVILEAQGDKWVTPCSLINRQMGSCYPIQEDHGLGTLQCHVEGDYIGSQNVSFSVFNKGKSMVHKKAWLISAKQDLFLYQTHSEILSVFPETGSLGGRTNITITGDFFDNSAXVTIAGIPCDIRHVSPRKIECTTRAPGKDVRLTTPQPGNRGLLFEVGDAVEGLELTEATPGYRWQIVPNASSPFGFWSQEGQPFRARLSGFFVAPETNNYTFWIQADSQASLHFSWSEEPRTKVKVASISVGTADWFDSWEQNRDEGTWQQKTPKLELLGGAMYYLEAEHHGIAPSRGMRIGVQIHNTWLNPDVVTTYLREKHQIRVRAQRLPEVQVLNVSGRGNFFLTWDNVSSQPIPANATAHLIQTTIEELLAVKCKLEPLWSNILLRLGFERGPEVSNSDGDLTSGTEPFCGRFSLRQPRHLVLTPPAAQKGYRLDQYTHLCLAYKGHMNKILKMIVSFTIGFQNMVKNTTCDWSLTRTSPESWQFDCTDLWETCVRCFGDLQPPPANSPVLVHQINLLPLAQETGLFYVDEIIIADTNVTVSQADSGTARPGGNLVESVSVVGSPPVYSVTSWLAGCGTELPLITARSVPTEGTEEGSGLVLVTTQRRQRTSPPLGGHFRIQLPNTVISDVPVQISAHHLHQLLQNNADDFTSRYLNASDFTVKEDLYTCYEHVWTLSWSTQIGDLPNFIRVSDENLTGVNPAAATRVVYDGGVFLGPIFGDMLATANQHTQVVVRVNDVPAHCPGSCSFQYLQGSTPCVHSVWYSIDGDINLMIYITGTGFSGDSQFLQVTVNKTSCKVIFSNQTNVVCQTDLLPVGMHRILMLVRPSGLAISATGEDLFLNVKPRLDMVEPSRAADIGGLWATIRGSSLEGVSLILFGSYSCAINVATSNSSRIQCKVPPRGKDGRIVNVTVIRGDYSAVLPRAFTYVSSLNPVIVTLSRNISNIAGGETLVIGVARLMNYTDLDVEVHVQDALAPVHTQSAWGLEVALPPLPAGLHRISVSINGVSIHSQGVDLHIQYLTEVFSIEPCCGSLLGGTILSISGIGFSRDPALVXVLVGNRSCDIVNLTEASIWCETLPAPQIPDAGAPTVPAAVEVWAGNRFFARGPSPSLVGKGFTFMYEAAATPVVTAMQGEITNSSLSLHVGGSNLSNSVILLGNLNCDVETQSFQGNVSLSGCSIPLHSLEAGIYPLQVRQKQMGFANMSVVLQQFAVMPRIMAIFPSQGSACGGTILTVRGLLLNSRRRSVRVDLSGPFTCVILSLGDHTILCQVSLEGDPLPGASFSLNVTVLVNGLTSECQGNCTLFIREEASPVMDALSTNTSGSLTTVLIRGQRLATTADEPMVFVDDQLPCNVTFFNASHVVCQTRDLAPGPHYLSVFYTRNGYACSGNVSRHFYIMPQVFHYFPKNFSLHGGSLLTIEGTGLRGQNTTSVYIDQQTCLTVNIGAELIRCIVPTGNGSVALEIEVDGLWYHIGVIGYNKAFTPELISISQSDDILTFAVAQISGAANIDIFIGMSPCVGVSGNHTVLQCVVPSLPAGEYHVRGYDCIRGWASSALVFTSRVIITAVTENFGCLGGRLVHVFGAGFSPGNVSAAVCGAPCRVLANATVSAFSCLVLPLDVSLAFLCGLKREEDSCEAARHTYVQCDLTVAMATEQLLESWPYLYICEESSQCLFVPDHWAESMFPSFSGLFISPKVERDEVLIYNSSCNITMETEAEMECETPNQPITVKITEIRKRWGQNTQGNFSLQFCRRWSRTHSWFPERLPQDGDNVTVENGQLLLLDTNTSILNLLHIKGGKLIFMAPGPIELRAHAILVSDGGELRIGSEDKPFQGRAQITLYGSSYSTPFFPYGVKFLAVRNGTLSLHGSLPEVIVTCLRATAHALDTVLALEDAVDWNPGDEVVIISGTGVKGAKPMEEIVTVETVQDTDLYLKSPLRYSHNFTENWVAGEHHILKATVALLSRSITIQGNLTNEREKLLVSCQEANAPEGNLQHCLYSMSEKMLGSRDMGARVIVQSFPEEPSQVQLKGVQFQVLGQAFHKHLSSLTLVGAMRESFIQGCTVRNSFSRGLSMCGTLGLKVDSNVFYNILGHAL

SEQ ID NO: 254 - DNA, 6129 bp, Homo Sapiens
  CDS (1)...(6129)
atgactgcctggctgatctctctgatgagtattgaagtactacttttggcagtacgtcacctgagtttacatattgaacctgaagaaggtagccttgcagggggaacgtggatcacagtcatttttgatggtttggagttgggtgttctttaccccaacaatggctctcaattggagatacacctggtgaacgtgaacatggtggtgcccgcactgcggagtgttccctgtgacgtctttcctgttttcttggatttgcctgtggtgacatgccggaccagatctgtgctgtctgaagcacatgagggtctgtacttcctggaagcatacttcgggggacagctggtaagcagtccaaatccaggaccacgagatagctgtactttcaagttttccaaggcgcagacacccatcgttcaccaagtttatccaccaagtggtgttccaggaaaactaatacatgtatatggctggattatcactggaagattggaaacttttgattttgatgctgagtacattgatagcccagtgatcttggaagctcaaggagacaaatgggttactccttgctctcttataaataggcagatgggaagctgttatcctattcaggaggaccatggtcttgggactctgcagtgccatgtggaaggcgactacatcggctcccagaatgttagcttctcagtatttaacaaaggaaagtcaatggtccacaagaaggcatggctgatcagtgctaaacaggatcttttcctataccagacacactcagaaatattatctgtgtttccagaaactgggagccttgggggaagaacaaacatcacaattacaggagacttttttgacaattctgcccaggttaccattgcaggcattccatgtgatattagacacgtgtctcccaggaagattgagtgcaccactcgggctccaggaaaagatgtgaggctcaccacccctcagccaggcaatcgagggcttctttttgaagttggagatgctgttgagggactggaactgactgaagccaccccagggtacaggtggcagattgtccctaatgccagttctccatttgggttttggtcacaggaaggacaacctttcagagcacggctcagtgggttctttgtggctccagagacaaataattacactttctggattcaggcagatagccaagcttccttgcatttcagttggtcagaggaaccaaggactaaggtgaaagtggcctccatcagcgtcggcactgctgactggtttgactcctgggagcagaatagggatgaagggacctggcagcagaagactcccaagttggagctgttgggtggagccatgtactacctggaagcagagcatcatgggatagccccaagcagggggatgaggattggtgtccagattcacaacacctggctgaatcctgatgtggtcaccacttacctacgggagaagcaccagatccgagtccgagcccagaggcttccagaagtacaggtgctgaatgtatcaggcagaggaaacttcttccttacttgggacaatgtctctagtcagccaatccctgcaaatgccacagcccatctgattcaaacaaccattgaggagttacttgcagtaaaatgcaaactggaacccctttggtctaacatccttctccggcttggatttgaacgaggcccagaagtttccaactctgatggggacctcaccagtgggacggagcccttctgtggcaggttcagcctccgtcagcctcgacaccttgtccttactcccccggctgcccagaagggctatcggctagatcagtatacacacctgtgtcttgcatacaaaggccacatgaacaagatcctgaagatgattgtgtccttcacaatcggctttcaaaacatggtaaagaataccacctgtgactggagtctcacgaggaccagccccgagagctggcagttcgattgcactgacctctgggagacttgtgtgcgttgcttcggggatctccagccccctccggcaaactccccagtgctggttcatcagatcaaccttctccctctggcccaggagacgggcctgttctatgtggatgaaattattattgcagacacaaacgtaacagtttctcaagctgattctggaacggctcgcccagggggcaatctggtggaatcagtctctgtggtgggatcccctccggtctacagtgtcacctcctggctggcggggtgtggcacggagctcccgctcatcactgcacgctctgtgcccactgaaggaacagaagagggatctggactggtcctggtgacgacacagagacgacagcggacaagtccacctctaggaggacactttcgcatccagcttcctaatacagtgatttctgatgtccctgtacaaatttctgctcatcaccttcaccagctcttacagaataatgccgatgacttcacatccaggtacctcaatgccagtgacttcactgtgaaggaggatctatacacttgctacgaacacgtgtggaccttgtcctggtccactcagattggggatttgcccaattttatcagggtctctgatgaaaaccttactggagtgaatcctgctgcagccacgcgtgtggtatatgatggtggagtttttcttggacccatatttggagacatgttggctactgccaaccagcatactcaggtggttgtgcgagtgaatgatgtaccagctcattgcccaggttcctgctctttccagtacctccaagggtcaactccctgtgtccattctgtgtggtactccattgatggtgacatcaacctaatgatttacattaccggaactggtttctctggtgactcccagttcttgcaggttacagtgaacaaaacgagttgcaaagttattttctcaaaccagaccaatgtagtctgtcagacagatttgctacctgttggaatgcatcggatcttgatgttggtgagaccctctggtcttgccatcagtgccactggagaagacctcttcctaaatgtgaaacctagactggatatggtggagccttccagagctgcggatattggagggctctgggccaccatccgaggctctagtttggaaggtgttagcctgatattatttggatcttactcgtgtgccatcaatgtcgctacaagcaattcaagcagaattcagtgcaaagttccacccagggggaaagatggacgcattgtgaatgtgactgtgatcagaggggactattctgcagttcttcccagagcatttacatatgtctcttccttaaatccagttattgtgactctgagcagaaacataagcaatatagcaggcggtgagaccctggtcattggagtggcgaggctgatgaactatacggatttggatgtggaagtccacgtccaggatgccttggctccggttcacacacagtcggcttggggcctggaggtggcactgcccccactgccagctggtctccacagaatttccgtctctatcaatggggtcagcattcactcacaaggggttgatctccacatccagtacctcacagaagttttcagcatcgagccttgctgtgggtccctgctgggagggaccatcctcagcatctcaggaataggcttcagcagggacccagctttggtttgggtacttgtgggcaatcggtcctgtgacattgtgaacttaacggaggcgagcatctggtgtgaaaccctgccagccccccagatacccgatgcgggcgctcccactgttccagctgccgtggaggtctgggctggcaacaggttcttcgcccgtggtccttcaccaagcttggtggggaaaggcttcaccttcatgtatgaagcggcagcaacaccagtagtcactgccatgcaaggagaaatcacaaatagcagcctgagcctgcatgtgggaggaagtaacctctccaactcagtcatccttctggggaacctgaactgtgatgttgagacacagtccttccagggcaacgtgagcctgtctggatgctccatccctcttcacagtctggaggctggcatctatcctctccaagtacgtcagaagcagatgggatttgctaatatgtctgtggtgctccagcaatttgcagtgatgcctcggataatggccatcttcccatcgcagggttcggcatgtggtgggaccatacttactgtgagggggttgcttcttaactctagaaggaggtcagttcgggttgacctctcgggtccttttacttgtgtgattttgagtttgggagaccacaccattctctgccaggttagcctggagggtgaccccttgcctggagcttccttctccctgaacgtcacagtcctggtcaatgggctaaccagcgagtgtcaggggaattgcactcttttcataagggaagaggcaagtcctgtcatggatgccttgtccacaaacaccagtgggtctctgaccactgtgctgattaggggtcagaggttagccaccacagctgatgagccgatggtatttgtggatgatcaacttccttgcaatgtaactttttttaatgcaagccacgttgtgtgccagacaagagacttggccccaggaccccactacctgtcagttttttatacaagaaatgggtatgcttgttctggtaatgtttccagacacttctacattatgccccaagtgtttcattattttcctaagaatttcagcttacatggtggaagcctcttgaccatagagggcacaggcctgagaggacagaacaccacgtcagtctatattgaccagcagacctgcctgacggtgaacatcggtgctgagctcatccggtgcattgttcccacagggaatggctctgttgccctggaaatagaggtagatggactttggtatcacataggagtcattggttataacaaggcctttaccccagaattgatctctatttctcagagcgatgacatcttaacctttgcagtggcccagatctcaggagctgcaaacattgacatttttataggaatgtcaccctgtgtgggtgtctctggtaaccacaccgttcttcagtgcgtggtcccttcccttccggccggggagtaccacgtcagaggctatgactgcatcagagggtgggcctcatctgccctggtgttcacctcaagagttattattacagcagtgacggagaacttcggctgcctgggtggaaggctggtgcatgtgtttggagcgggattttctccagggaatgtctcagctgctgtgtgtggtgctccctgccgagtcctggctaatgctacagtgtctgccttcagctgcttggttctgcccctggatgtgtccttggccttcctgtgtggcctgaagcgtgaggaggacagctgtgaggctgccagacacacctatgtgcagtgtgatttgacagttgccatggcgacagagcaactgcttgaatcgtggccttacctctacatttgcgaggaaagttcccaatgcctctttgtgccagatcattgggcagagtcaatgtttccatcattctcgggcctctttatcagccctaaagtggaaagagatgaagttctcatctataatagctcctgtaacattaccatggaaactgaggcagagatggagtgtgagacgcccaatcagccaattaccgtcaagattactgagatacggaaacgctggggccagaacactcagggcaacttttctttacagttctgccggagatggtccaggactcacagctggtttcctgaaaggctgccacaagatggcgacaacgtcacagtggagaatggccaattgcttctgctggacactaacacaagcatcctcaacttactgcacattaaagggggcaagctgattttcatggccccaggacccatcgagctcagggcacacgccatccttgtttctgatggtggagagctccggattggatccgaagacaagcccttccaaggcagagctcagatcacactctacgggagttcctactcaactcccttctttccctatggagtcaagttcctggctgtgaggaatggaactctttctctgcacggtgagtga

SEQ ID NO: 255 - protein, 2042 aa, Homo Sapiens
MTAWLISLMSIEVLLLAVRHLSLHIEPEEGSLAGGTWITVIFDGLELGVLYPNNGSQLEIHLVNVNMVVPALRSVPCDVFPVFLDLPVVTCRTRSVLSEAHEGLYFLEAYFGGQLVSSPNPGPRDSCTFKFSKAQTPIVHQVYPPSGVPGKLIHVYGWIITGRLETFDFDAEYIDSPVILEAQGDKWVTPCSLINRQMGSCYPIQEDHGLGTLQCHVEGDYIGSQNVSFSVFNKGKSMVHKKAWLISAKQDLFLYQTHSEILSVFPETGSLGGRTNITITGDFFDNSAQVTIAGIPCDIRHVSPRKIECTTRAPGKDVRLTTPQPGNRGLLFEVGDAVEGLELTEATPGYRWQIVPNASSPFGFWSQEGQPFRARLSGFFVAPETNNYTFWIQADSQASLHFSWSEEPRTKVKVASISVGTADWFDSWEQNRDEGTWQQKTPKLELLGGAMYYLEAEHHGIAPSRGMRIGVQIHNTWLNPDVVTTYLREKHQIRVRAQRLPEVQVLNVSGRGNFFLTWDNVSSQPIPANATAHLIQTTIEELLAVKCKLEPLWSNILLRLGFERGPEVSNSDGDLTSGTEPFCGRFSLRQPRHLVLTPPAAQKGYRLDQYTHLCLAYKGHMNKILKMIVSFTIGFQNMVKNTTCDWSLTRTSPESWQFDCTDLWETCVRCFGDLQPPPANSPVLVHQINLLPLAQETGLFYVDEIIIADTNVTVSQADSGTARPGGNLVESVSVVGSPPVYSVTSWLAGCGTELPLITARSVPTEGTEEGSGLVLVTTQRRQRTSPPLGGHFRIQLPNTVISDVPVQISAHHLHQLLQNNADDFTSRYLNASDFTVKEDLYTCYEHVWTLSWSTQIGDLPNFIRVSDENLTGVNPAAATRVVYDGGVFLGPIFGDMLATANQHTQVVVRVNDVPAHCPGSCSFQYLQGSTPCVHSVWYSIDGDINLMIYITGTGFSGDSQFLQVTVNKTSCKVIFSNQTNVVCQTDLLPVGMHRILMLVRPSGLAISATGEDLFLNVKPRLDMVEPSRAADIGGLWATIRGSSLEGVSLILFGSYSCAINVATSNSSRIQCKVPPRGKDGRIVNVTVIRGDYSAVLPRAFTYVSSLNPVIVTLSRNISNIAGGETLVIGVARLMNYTDLDVEVHVQDALAPVHTQSAWGLEVALPPLPAGLHRISVSINGVSIHSQGVDLHIQYLTEVFSIEPCCGSLLGGTILSISGIGFSRDPALVWVLVGNRSCDIVNLTEASIWCETLPAPQIPDAGAPTVPAAVEVWAGNRFFARGPSPSLVGKGFTFMYEAAATPVVTAMQGEITNSSLSLHVGGSNLSNSVILLGNLNCDVETQSFQGNVSLSGCSIPLHSLEAGIYPLQVRQKQMGFANMSVVLQQFAVMPRIMAIFPSQGSACGGTILTVRGLLLNSRRRSVRVDLSGPFTCVILSLGDHTILCQVSLEGDPLPGASFSLNVTVLVNGLTSECQGNCTLFIREEASPVMDALSTNTSGSLTTVLIRGQRLATTADEPMVFVDDQLPCNVTFFNASHVVCQTRDLAPGPHYLSVFYTRNGYACSGNVSRHFYIMPQVFHYFPKNFSLHGGSLLTIEGTGLRGQNTTSVYIDQQTCLTVNIGAELIRCIVPTGNGSVALEIEVDGLWYHIGVIGYNKAFTPELISISQSDDILTFAVAQISGAANIDIFIGMSPCVGVSGNHTVLQCVVPSLPAGEYHVRGYDCIRGWASSALVFTSRVIITAVTENFGCLGGRLVHVFGAGFSPGNVSAAVCGAPCRVLANATVSAFSCLVLPLDVSLAFLCGLKREEDSCEAARHTYVQCDLTVAMATEQLLESWPYLYICEESSQCLFVPDHWAESMFPSFSGLFISPKVERDEVLIYNSSCNITMETEAEMECETPNQPITVKITEIRKRWGQNTQGNFSLQFCRRWSRTHSWFPERLPQDGDNVTVENGQLLLLDTNTSILNLLHIKGGKLIFMAPGPIELRAHAILVSDGGELRIGSEDKPFQGRAQITLYGSSYSTPFFPYGVKFLAVRNGTLSLHGE

SEQ ID NO: 256 - DNA, 4956 bp, Homo Sapiens
  CDS (1)...(4956)
atgaacaagatcctgaagatgattgtgtccttcacaatcggctttcaaaacatggtaaagaataccacctgtgactggagtctcacgaggaccagccccgagagctggcagttcgattgcactgacctctgggagacttgtgtgcgttgcttcggggatctccagccccctccggcaaactccccagtgctggttcatcagatcaaccttctccctctggcccaggagacgggcctgttctatgtggatgaaattattattgcagacacaaacgtaacagtttctcaagctgattctggaacggctcgcccagggggcaatctggtggaatcagtctctgtggtgggatcccctccggtctacagtgtcacctcctggctggcggggtgtggcacggagctcccgctcatcactgcacgctctgtgcccactgaaggaacagaagagggatctggactggtcctggtgacgacacagagacgacagcggacaagtccacctctaggaggacactttcgcatccagcttcctaatacagtgatttctgatgtccctgtacaaatttctgctcatcaccttcaccagctcttacagaataatgccgatgacttcacatccaggtacctcaatgccagtgacttcactgtgaaggaggatctatacacttgctacgaacacgtgtggaccttgtcctggtccactcagattggggatttgcccaattttatcagggtctctgatgaaaaccttactggagtgaatcctgctgcagccacgcgtgtggtatatgatggtggagtttttcttggacccatatttggagacatgttggctactgccaaccagcatactcaggtggttgtgcgagtgaatgatgtaccagctcattgcccaggttcctgctctttccagtacctccaagggtcaactccctgtgtccattctgtgtggtactccattgatggtgacatcaacctaatgatttacattaccggaactggtttctctggtgactcccagttcttgcaggttacagtgaacaaaacgagttgcaaagttattttctcaaaccagaccaatgtagtctgtcagacagatttgctacctgttggaatgcatcggatcttgatgttggtgagaccctctggtcttgccatcagtgccactggagaagacctcttcctaaatgtgaaacctagactggatatggtggagccttccagagctgcggatattggagggctctgggccaccatccgaggctctagtttggaaggtgttagcctgatattatttggatcttactcgtgtgccatcaatgtcgctacaagcaattcaagcagaattcagtgcaaagttccacccagggggaaagatggacgcattgtgaatgtgactgtgatcagaggggactattctgcagttcttcccagagcatttacatatgtctcttccttaaatccagttattgtgactctgagcagaaacataagcaatatagcaggcggtgagaccctggtcattggagtggcgaggctgatgaactatacggatttggatgtggaagtccacgtccaggatgccttggctccggttcacacacagtcggcttggggcctggaggtggcactgcccccactgccagctggtctccacagaatttccgtctctatcaatggggtcagcattcactcacaaggggttgatctccacatccagtacctcacagaagttttcagcatcgagccttgctgtgggtccctgctgggagggaccatcctcagcatctcaggaataggcttcagcagggacccagctttggtttcggtacttgtgggcaatcggtcctgtgacattgtgaacttaacggaggcgagcatctggtgtgaaaccctgccagccccccagatacccgatgcgggcgctcccactgttccagctgccgtggaggtctgggctggcaacaggttcttcgcccgtggtccttcaccaagcttggtggggaaaggcttcaccttcatgtatgaagcggcagcaacaccagtagtcactgccatgcaaggagaaatcacaaatagcagcctgagcctgcatgtgggaggaagtaacctctccaactcagtcatccttctggggaacctgaactgtgatgttgagacacagtccttccagggcaacgtgagcctgtctggatgctccatccctcttcacagtctggaggctggcatctatcctctccaagtacgtcagaagcagatgggatttgctaatatgtctgtggtgctccagcaatttgcagtgatgcctcggataatggccatcttcccatcgcagggttcggcatgtggtgggaccatacttactgtgagggggttgcttcttaactctagaaggaggtcagttcgggttgacctctcgggtccttttacttgtgtgattttgagtttgggagaccacaccattctctgccaggttagcctggagggtgaccccttgcctggagcttccttctccctgaacgtcacagtcctggtcaatgggctaaccagcgagtgtcaggggaattgcactcttttcataagggaagaggcaagtcctgtcatggatgccttgtccacaaacaccagtgggtctctgaccactgtgctgattaggggtcagaggttagccaccacagctgatgagccgatggtatttgtggatgatcaacttccttgcaatgtaactttttttaatgcaagccacgttgtgtgccagacaagagacttggccccaggaccccactacctgtcagttttttatacaagaaatgggtatgcttgttctggtaatgtttccagacacttctacattatgccccaagtgtttcattattttcctaagaatttcagcttacatggtggaagcctcttgaccatagagggcacaggcctgagaggacagaacaccacgtcagtctatattgaccagcagacctgcctgacggtgaacatcggtgctgagctcatccggtgcattgttcccacagggaatggctctgttgccctggaaatagaggtagatggactttggtatcacataggagtcattggttataacaaggcctttaccccagaattgatctctatttctcagagcgatgacatcttaacctttgcagtggcccagatctcaggagctgcaaacattgacatttttataggaatgtcaccctgtgtgggtgtctctgggaaccacaccgttcttcagtgcgtggtcccttcccttccggccggggagtaccacgtcagaggctatgactgcatcagagggtgggcctcatctgccctggtgttcacctcaagagttattattacagcagtgacggagaacttcggctgcctgggtggaaggctggtgcatgtgtttggagcgggattttctccagggaatgtctcagctgctgtgtgtggtgctccctgccgagtcctggctaatgctacagtgtctgccttcagctgcttggttctgcccctggatgtgtccttggccttcctgtgtggcctgaagcgtgaggaggacagctgtgaggctgccagacacacctatgtgcagtgtgatttgacagttgccatggcgacagagcaactgcttgaatcgtggccttacctctacatttgcgaggaaagttcccaatgcctctttgtgccagatcattgggcagagtcaatgtttccatcattctcgggcctctttatcagccctaaagtggaaagagatgaagttctcatctataatagctcctgtaacattaccatggaaactgaggcagagatggagtgtgagacgcccaatcagccaattaccgtcaagattactgagatacggaaacgctggggccagaacactcagggcaacttttctttacagttctgccggagatggtccaggactcacagctggtttcctgaaaggctgccacaagatggcgacaacgtcacagtggagaatggccaattgcttctgctggacactaacacaagcatcctcaacttactgcacattaaagggggcaagctgattttcatggccccaggacccatcgagctcagggcacacgccatccttgtttctgatggtggagagctccggattggatccgaagacaagcccttccaaggcagagctcagatcacactctacgggagttcctactcaactcccttctttccctatggagtcaagttcctggctgtgaggaatggaactctttctctgcacggttcactaccagaagtaattgtcacctgtcttagagcaactgcccatgccctagacacagtgctggctttagaagatgctgtggactggaaccctggggatgaagttgtcatcatcagtggaacaggtgttaaaggtgccaaaccgatggaagagattgtcactgtggaaactgtgcaggatacagacctctatcttaagtcacctttgagatattctcacaactttacagagaattgggtggctggagagcaccatattttaaaggccactgtggctctgctcagcaggagtattaccatacaaggaaatctcactaatgagagggagaagctgcttgtttcatgccaggaggccaatgctccagaaggtaatctgcagcactgtttgtattccatgagtgagaagatgctaggatccagggatatgggagccagagtgatcgttcagtccttcccagaagagcccagccaggtccagttgaagggagtgcagtttcaagtcttggggcaagccttccataagcatctgagctcactcactctggtgggagctatgagagagtctttcatacagggctgcacagtgaggaactccttcagtagaggcctcagcatgtgcgggaccttgggcctgaaggtggacagtaatgtattctacaatattttaggtcatgcgctgctagttggtaagtaa

SEQ ID NO: 257 - protein, 1651 aa, Homo Sapiens
MNKILKMIVSFTIGFQNMVKNTTCDWSLTRTSPESWQFDCTDLWETCVRCFGDLQPPPANSPVLVHQINLLPLAQETGLFYVDEIIIADTNVTVSQADSGTARPGGNLVESVSVVGSPPVYSVTSWLAGCGTELPLITARSVPTEGTEEGSGLVLVTTQRRQRTSPPLGGHFRIQLPNTVISDVPVQISAHHLHQLLQNNADDFTSRYLNASDFTVKEDLYTCYEHVWTLSWSTQIGDLPNFIRVSDENLTGVNPAAATRVVYDGGVFLGPIFGDMLATANQHTQVVVRVNDVPAHCPGSCSFQYLQGSTPCVHSVWYSIDGDINLMIYITGTGFSGDSQFLQVTVNKTSCKVIFSNQTNVVCQTDLLPVGMHRILMLVRPSGLAISATGEDLFLNVKPRLDMVEPSRAADIGGLWATIRGSSLEGVSLILFGSYSCAINVATSNSSRIQCKVPPRGKDGRIVNVTVIRGDYSAVLPRAFTYVSSLNPVIVTLSRNISNIAGGETLVIGVARLMNYTDLDVEVHVQDALAPVHTQSAWGLEVALPPLPAGLHRISVSINGVSIHSQGVDLHIQYLTEVFSIEPCCGSLLGGTILSISGIGFSRDPALVSVLVGNRSCDIVNLTEASIWCETLPAPQIPDAGAPTVPAAVEVWAGNRFFARGPSPSLVGKGFTFMYEAAATPVVTAMQGEITNSSLSLHVGGSNLSNSVILLGNLNCDVETQSFQGNVSLSGCSIPLHSLEAGIYPLQVRQKQMGFANMSVVLQQFAVMPRIMAIFPSQGSACGGTILTVRGLLLNSRRRSVRVDLSGPFTCVILSLGDHTILCQVSLEGDPLPGASFSLNVTVLVNGLTSECQGNCTLFIREEASPVMDALSTNTSGSLTTVLIRGQRLATTADEPMVFVDDQLPCNVTFFNASHVVCQTRDLAPGPHYLSVFYTRNGYACSGNVSRHFYIMPQVFHYFPKNFSLHGGSLLTIEGTGLRGQNTTSVYIDQQTCLTVNIGAELIRCIVPTGNGSVALEIEVDGLWYHIGVIGYNKAFTPELISISQSDDILTFAVAQISGAANIDIFIGMSPCVGVSGNHTVLQCVVPSLPAGEYHVRGYDCIRGWASSALVFTSRVIITAVTENFGCLGGRLVHVFGAGFSPGNVSAAVCGAPCRVLANATVSAFSCLVLPLDVSLAFLCGLKREEDSCEAARHTYVQCDLTVAMATEQLLESWPYLYICEESSQCLFVPDHWAESMFPSFSGLFISPKVERDEVLIYNSSCNITMETEAEMECETPNQPITVKITEIRKRWGQNTQGNFSLQFCRRWSRTHSWFPERLPQDGDNVTVENGQLLLLDTNTSILNLLHIKGGKLIFMAPGPIELRAHAILVSDGGELRIGSEDKPFQGRAQITLYGSSYSTPFFPYGVKFLAVRNGTLSLHGSLPEVIVTCLRATAHALDTVLALEDAVDWNPGDEVVIISGTGVKGAKPMEEIVTVETVQDTDLYLKSPLRYSHNFTENWVAGEHHILKATVALLSRSITIQGNLTNEREKLLVSCQEANAPEGNLQHCLYSMSEKMLGSRDMGARVIVQSFPEEPSQVQLKGVQFQVLGQAFHKHLSSLTLVGAMRESFIQGCTVRNSFSRGLSMCGTLGLKVDSNVFYNILGHALLVGK

SEQ ID NO: 258 - DNA, 1368 bp, Homo Sapiens
  CDS (1)...(1368)
atgaggattgtttgtttagtgaaaaaccaacagcccctgggagccaccatcaagcgccacgagatgacaggggacatcttggtggccaggatcatccacggtgggctggcggagagaagtgggttgctatatgctggagacaaactggtagaagtgaatggagtttcagttgagggactggaccctgaacaagtgatccatattctggccatgtctcgaggcacaatcatgttcaaggtggttccagtctctgaccctcctgtgaatagccagcagatggtgtacgtccgtgccatgactgagtactggccccaggaggatcccgacatcccctgcatggacgctggattgcctttccagaagggggacatcctccagattgtggaccagaatgatgccctctggtggcaggcccgaaaaatctcagaccctgctacctgcgctgggcttgtcccttctaaccaccttctgaagaggaagcaacgggaattctggtggtctcagccgtaccagcctcacacctgcctcaagtcaaccctatacaaggaggagtttgttggctacggtcagaagttctttatagctggcttccgccgcagcatgcgcctttgtcgcaggaagtctcacctcagcccgctgcatgccagtgtgtgctgcaccggcagctgctacagtgcagtgggtgccccttacgaggaggtggtgaggtaccagcgacgcccttcagacaagtaccgcctcatagtgctcatgggaccctctggtgttggagtaaatgagctcagaagacaacttattgaatttaatcccagccattttcaaagtgctgtgccacacactactcgtactaaaaagagttacgaaatgaatgggcgtgagtatcactatgtgtccaaggaaacatttgaaaacctcatatatagtcacaggatgctggagtatggtgagtacaaaggccacctgtatggcactagtgtggatgctgttcaaacagtccttgtcgaaggaaagatctgtgtcatggacctagagcctcaggatattcaaggggttcgaacccatgaactgaagccctatgtcatatttataaagccatcgaatatgaggtgtatgaaacaatctcggaaaaatgccaaggttattactgactactatgtggacatgaagttcaaggatgaagacctacaagagatggaaaatttagcccaaagaatggaaactcagtttggccaattttttgatcatgtgattgtgaatgacagcttgcacgatgcatgtgcccagttgttgtctgccatacagaaggctcaggaggagcctcagtgggtaccagcaacatggatttcctcagatactgagtctcaatga

SEQ ID NO: 259 - protein, 455 aa, Homo Sapiens
MRIVCLVKNQQPLGATIKRHEMTGDILVARIIHGGLAERSGLLYAGDKLVEVNGVSVEGLDPEQVIHILAMSRGTIMFKVVPVSDPPVNSQQMVYVRAMTEYWPQEDPDIPCMDAGLPFQKGDILQIVDQNDALWWQARKISDPATCAGLVPSNHLLKRKQREFWWSQPYQPHTCLKSTLYKEEFVGYGQKFFIAGFRRSMRLCRRKSHLSPLHASVCCTGSCYSAVGAPYEEVVRYQRRPSDKYRLIVLMGPSGVGVNELRRQLIEFNPSHFQSAVPHTTRTKKSYEMNGREYHYVSKETFENLIYSHRMLEYGEYKGHLYGTSVDAVQTVLVEGKICVMDLEPQDIQGVRTHELKPYVIFIKPSNMRCMKQSRKNAKVITDYYVDMKFKDEDLQEMENLAQRMETQFGQFFDHVIVNDSLHDACAQLLSAIQKAQEEPQWVPATWISSDTESQ

SEQ ID NO: 260 - DNA, 2337 bp, Homo Sapiens
  CDS (1)...(2337)
atgtcgtccggggccaaggagggaggtgggggctctcccgcctaccacctcccccacccccacccccacccaccccagcacgcccaatatgtgggcccctatcggctggagaagacgctgggcaaaggacagacagggctggttaaactcggggtccactgcatcacgggtcagaaggtcgccatcaagatcgtgaaccgggagaagctgtcggagtcggtgctgatgaaggtggagcgggagatcgccatcctgaagctcatcgaacacccacatgtcctcaagctccacgacgtctacgagaacaagaaatatttgtacctggttctggagcacgtctcggggggtgagctattcgactacctggtaaagaaggggagactgacgcccaaggaggcccgaaagttcttccgccagattgtgtctgcgctggacttctgccacagctactccatctgccacagagacctaaagcccgagaacctgcttttggatgagaaaaacaacatccgcattgcagacttcggcatggcgtccctgcaggtgggggacagcctcctggagaccagctgcgggtccccccattatgcgtgtccagaggtgattaagggggaaaaatatgatggccgccgggcagacatgtggagctgtggagtcatcctcttcgccctgctcgtgggggctctgccctttgatgacgacaacctccgccagctgctggagaaggtgaaacggggcgtcttccacatgccccacttcattcctccagattgccagagcctcctgaggggaatgatcgaagtggagcccgaaaaaaggctcagtctggagcaaattcagaaacatccttggtacctaggcgggaaacacgagccagacccgtgcctggagccagcccctggccgccgggtagccatgcggagcctgccatccaacggagagctggaccccgacgtcctagagagcatggcatcactgggctgcttcagggaccgcgagaggctgcatcgcgagctgcgcagtgaggaggagaaccaagaaaagatgatatattatctgcttttggatcggaaggagcggtatcccagctgtgaggaccaggacctgcctccccggaatgatgttgaccccccccggaagcgtgtggattctcccatgctgagccgtcacgggaagcggcgaccagagcggaagtccatggaagtcctgagcatcaccgatgccgggggtggtggctcccctgtacccacccgacgggccttggagatggcccagcacagccagagatcccgtagcgtcagtggagcctccacgggtctgtcctccagccctctaagcagcccaaggagtccggtcttttccttttcaccggagccgggggctggagatgaggctcgaggcgggggctccccgacttccaaaacgcagacgctgccttctcggggccccaggggtgggggcgccggggagcagcccccgccccccagtgcccgctccacacccctgcccggccccccaggctccccgcgctcctctggcgggacccccttgcactcgcctctgcacacgccccgggccagtcccaccgggaccccggggacaacaccaccccccagccccggcggtggcgtcgggggagccgcctggaggagtcgtctcaactccatccgcaacagcttcctgggctcccctcgctttcaccggcgcaagatgcaggtccctaccgctgaggagatgtccagcttgacgccagagtcctccccggagctggcaaaacgctcctggttcgggaacttcatctccttggacaaagaagaacaaatattcctcgtgctaaaggacaaacctctcagcagcatcaaagcagacatcgtccatgcctttctgtcgatccccagcctgagtcacagtgtgctgtcacagaccagcttcagggccgagtacaaggccagtggcggcccctccgtcttccaaaagcccgtccgcttccaggtggacatcagctcctctgagggtccagagccctccccgcgacgggacggcagcggaggtggtggcatctactccgtcaccttcactctcatctcgggtcccagccgtcggttcaagcgagtggtggagaccatccaggcacagctcctgagcactcatgaccagccctccgtgcaggccctggcagacgagaagaacggggcccagacccggcctgctggtgccccaccccgaagcctgcagcccccacccggccgcccagacccagagctgagcagctctccccgccgaggcccccccaaggacaagaagctcctggccaccaacgggacccctctgccctga

SEQ ID NO: 261 - protein, 778 aa, Homo Sapiens
MSSGAKEGGGGSPAYHLPHPHPHPPQHAQYVGPYRLEKTLGKGQTGLVKLGVHCITGQKVAIKIVNREKLSESVLMKVEREIAILKLIEHPHVLKLHDVYENKKYLYLVLEHVSGGELFDYLVKKGRLTPKEARKFFRQIVSALDFCHSYSICHRDLKPENLLLDEKNNIRIADFGMASLQVGDSLLETSCGSPHYACPEVIKGEKYDGRRADMWSCGVILFALLVGALPFDDDNLRQLLEKVKRGVFHMPHFIPPDCQSLLRGMIEVEPEKRLSLEQIQKHPWYLGGKHEPDPCLEPAPGRRVAMRSLPSNGELDPDVLESMASLGCFRDRERLHRELRSEEENQEKMIYYLLLDRKERYPSCEDQDLPPRNDVDPPRKRVDSPMLSRHGKRRPERKSMEVLSITDAGGGGSPVPTRRALEMAQHSQRSRSVSGASTGLSSSPLSSPRSPVFSFSPEPGAGDEARGGGSPTSKTQTLPSRGPRGGGAGEQPPPPSARSTPLPGPPGSPRSSGGTPLHSPLHTPRASPTGTPGTTPPPSPGGGVGGAAWRSRLNSIRNSFLGSPRFHRRKMQVPTAEEMSSLTPESSPELAKRSWFGNFISLDKEEQIFLVLKDKPLSSIKADIVHAFLSIPSLSHSVLSQTSFRAEYKASGGPSVFQKPVRFQVDISSSEGPEPSPRRDGSGGGGIYSVTFTLISGPSRRFKRVVETIQAQLLSTHDQPSVQALADEKNGAQTRPAGAPPRSLQPPPGRPDPELSSSPRRGPPKDKKLLATNGTPLP

SEQ ID NO: 262 - DNA, 2289 bp, Homo Sapiens
  CDS (1)...(2289)
atgggacttgagtttggtttcctagaggctggtggaaactggagtcacttcctcccagggagtgatgggaactggaatctcttcctcccaggaattaatggaaactggagtctcttcctcccagggacccatgggaattggagtctctttctcccaaggatcatgggaattggagttctctgccaccaggagccagtggaagtgggagacgaggccctttggtcctccacatgccccttccagccctctgccccctctatatcctttaggtacctggttctggagcacgtctcggggggtgagctattcgactacctggtaaagaaggggagactgacgcccaaggaggcccgaaagttcttccgccagattgtgtctgcgctggacttctgccacagctactccatctgccacagagacctaaagcccgagaacctgcttttggatgagaaaaacaacatccgcattgcagacttcggcatggcgtccctgcaggtgggggacagcctcctggagaccagctgcgggtccccccattatgcgtgtccagaggtgattaagggggaaaaatatgatggccgccgggcagacatgtggagctgtggagtcatcctcttcgccctgctcgtgggggctctgccctttgatgacgacaacctccgccagctgctggagaaggtgaaacggggcgtcttccacatgccccacttcattcctccagattgccagagcctcctgaggggaatgatcgaagtggagcccgaaaaaaggctcagtctggagcaaattcagaaacatccttggtacctaggcgggaaacacgagccagacccgtgcctggagccagcccctggccgccgggtagccatgcggagcctgccatccaacggagagctggaccccgacgtcctagagagcatggcatcactgggctgcttcagggaccgcgagaggctgcatcgcgagctgcgcagtgaggaggagaaccaagaaaagatgatatattatctgcttttggatcggaaggagcggtatcccagctgtgaggaccaggacctgcctccccggaatgatgttgaccccccccggaagcgtgtggattctcccatgctgagccgtcacgggaagcggcgaccagagcggaagtccatggaagtcctgagcatcaccgatgccgggggtggtggctcccctgtacccacccgacgggccttggagatggcccagcacagccagagatcccgtagcgtcagtggagcctccacgggtctgtcctccagccctctaagcagcccaaggagtccggtcttttccttttcaccggagccgggggctggagatgaggctcgaggcgggggctccccgacttccaaaacgcagacgctgccttctcggggccccaggggtgggggcgccggggagcagcccccgccccccagtgcccgctccacacccctgcccggccccccaggctccccgcgctcctctggcgggacccccttgcactcgcctctgcacacgccccgggccagtcccaccgggaccccggggacaacaccaccccccagccccggcggtggcgtcgggggagccgcctggaggagtcgtctcaactccatccgcaacagcttcctgggctcccctcgctttcaccggcgcaagatgcaggtccctaccgctgaggagatgtccagcttgacgccagagtcctccccggagctggcaaaacgctcctggttcgggaacttcatctccttggacaaagaagaacaaatattcctcgtgctaaaggacaaacctctcagcagcatcaaagcagacatcgtccatgcctttctgtcgatccccagcctgagtcacagtgtgctgtcacagaccagcttcagggccgagtacaaggccagtggcggcccctccgtcttccaaaagcccgtccgcttccaggtggacatcagctcctctgagggtccagagccctccccgcgacgggacggcagcggaggtggtggcatctactccgtcaccttcactctcatctcgggtcccagccgtcggttcaagcgagtggtggagaccatccaggcacagctcctgagcactcatgaccagccctccgtgcaggccctggcagacgagaagaacggggcccagacccggcctgctggtgccccaccccgaagcctgcagcccccacccggccgcccagacccagagctgagcagctctccccgccgaggcccccccaaggacaagaagctcctggccaccaacgggacccctctgccctga

SEQ ID NO: 263 - protein, 762 aa, Homo Sapiens [sequence omitted]

SEQ ID NO: 264 - DNA, 2112 bp, Homo Sapiens
  CDS (1)...(2112)
atgaaggtggagcgggagatcgccatcctgaagctcatcgaacacccacatgtcctcaagctccacgacgtctacgagaacaagaaatatttgtacctggttctggagcacgtctcggggggtgagctattcgactacctggtaaagaaggggagactgacgcccaaggaggcccgaaagttcttccgccagattgtgtctgcgctggacttctgccacagctactccatctgccacagagacctaaagcccgagaacctgcttttggatgagaaaaacaacatccgcattgcagacttcggcatggcgtccctgcaggtgggggacagcctcctggagaccagctgcgggtccccccattatgcgtgtccagaggtgattaagggggaaaaatatgatggccgccgggcagacatgtggagctgtggagtcatcctcttcgccctgctcgtgggggctctgccctttgatgacgacaacctccgccagctgctggagaaggtgaaacggggcgtcttccacatgccccacttcattcctccagattgccagagcctcctgaggggaatgatcgaagtggagcccgaaaaaaggctcagtctggagcaaattcagaaacatccttggtacctaggcgggaaacacgagccagacccgtgcctggagccagcccctggccgccgggtagccatgcggagcctgccatccaacggagagctggaccccgacgtcctagagagcatggcatcactgggctgcttcagggaccgcgagaggctgcatcgcgagctgcgcagtgaggaggagaaccaagaaaagatgatatattatctgcttttggatcggaaggagcggtatcccagctgtgaggaccaggacctgcctccccggaatgatgttgaccccccccggaagcgtgtggattctcccatgctgagccgtcacgggaagcggcgaccagagcggaagtccatggaagtcctgagcatcaccgatgccgggggtggtggctcccctgtacccacccgacgggccttggagatggcccagcacagccagagatcccgtagcgtcagtggagcctccacgggtctgtcctccagccctctaagcagcccaaggagtccggtcttttccttttcaccggagccgggggctggagatgaggctcgaggcgggggctccccgacttccaaaacgcagacgctgccttctcggggccccaggggtgggggcgccggggagcagcccccgccccccagtgcccgctccacacccctgcccggccccccaggctccccgcgctcctctggcgggacccccttgcactcgcctctgcacacgccccgggccagtcccaccgggaccccggggacaacaccaccccccagccccggcggtggcgtcgggggagccgcctggaggagtcgtctcaactccatccgcaacagcttcctgggctcccctcgctttcaccggcgcaagatgcaggtccctaccgctgaggagatgtccagcttgacgccagagtcctccccggagctggcaaaacgctcctggttcgggaacttcatctccttggacaaagaagaacaaatattcctcgtgctaaaggacaaacctctcagcagcatcaaagcagacatcgtccatgcctttctgtcgatccccagcctgagtcacagtgtgctgtcacagaccagcttcagggccgagtacaaggccagtggcggcccctccgtcttccaaaagcccgtccgcttccaggtggacatcagctcctctgagggtccagagccctccccgcgacgggacggcagcggaggtggtggcatctactccgtcaccttcactctcatctcgggtcccagccgtcggttcaagcgagtggtggagaccatccaggcacagctcctgagcactcatgaccagccctccgtgcaggccctggcagacgagaagaacggggcccagacccggcctgctggtgccccaccccgaagcctgcagcccccacccggccgcccagacccagagctgagcagctctccccgccgaggcccccccaaggacaagaagctcctggccaccaacgggacccctctgccctga

SEQ ID NO: 265 - protein, 703 aa, Homo Sapiens
MKVEREIAILKLIEHPHVLKLHDVYENKKYLYLVLEHVSGGELFDYLVKKGRLTPKEARKFFRQIVSALDFCHSYSICHRDLKPENLLLDEKNNIRIADFGMASLQVGDSLLETSCGSPHYACPEVIKGEKYDGRRADMWSCGVILFALLVGALPFDDDNLRQLLEKVKRGVFHMPHFIPPDCQSLLRGMIEVEPEKRLSLEQIQKHPWYLGGKHEPDPCLEPAPGRRVAMRSLPSNGELDPDVLESMASLGCFRDRERLHRELRSEEENQEKMIYYLLLDRKERYPSCEDQDLPPRNDVDPPRKRVDSPMLSRHGKRRPERKSMEVLSITDAGGGGSPVPTRRALEMAQHSQRSRSVSGASTGLSSSPLSSPRSPVFSFSPEPGAGDEARGGGSPTSKTQTLPSRGPRGGGAGEQPPPPSARSTPLPGPPGSPRSSGGTPLHSPLHTPRASPTGTPGTTPPPSPGGGVGGAAWRSRLNSIRNSFLGSPRFHRRKMQVPTAEEMSSLTPESSPELAKRSWFGNFISLDKEEQIFLVLKDKPLSSIKADIVHAFLSIPSLSHSVLSQTSFRAEYKASGGPSVFQKPVRFQVDISSSEGPEPSPRRDGSGGGGIYSVTFTLISGPSRRFKRVVETIQAQLLSTHDQPSVQALADEKNGAQTRPAGAPPRSLQPPPGRPDPELSSSPRRGPPKDKKLLATNGTPLP

SEQ ID NO: 266 - DNA, 1158 bp, Homo Sapiens
  CDS (1)...(1158)
atggggtgcggcgccagcaggaaggtggtcccggggccaccagcgctggcttgggccaagcacgaaggtcaaaaccaagccggcgtcggaggcgcggggcctgggcccgaggcggcggcccaggcggcgcagaggatacaggtggctcgcttccgagccaagttcgacccccgggtccttgccagatatgacatcaaagctcttattgggacaggcagtttcagcagggttgtcagggtagagcagaagaccaccaagaaaccttttgcaataaaagtgatggaaaccagagagagggaaggtagagaagcgtgcgtgtctgagctgagcgtcctgcggcgggttagccatcgttacattgtccagctcatggagatctttgagactgaggatcaagtttacatggtaatggagctggctaccggaggggagctctttgatcgactcattgctcagggatcctttacagagcgggatgccgtcaggatcctccagatggttgctgatgggattaggtatttgcatgcgctgcagataactcataggaatctaaagcctgaaaacctcttatactatcatccaggtgaagagtcgaaaattttaattacagattttggtttggcatactccgggaaaaaaagtggtgactggacaatgaagacactctgtgggaccccagagtacatagctcctgaggttttgctaaggaagccttataccagtgcagtggacatgtgggctcttggtgtgatcacatatgctttacttagcggattcctgccttttgatgatgaaagccagacaaggctttacaggaagattctgaaaggcaaatataattatacaggagagccttggccaagcatttcccacttggcgaaggactttatagacaaactactgattttggaggctggtcatcgcatgtcagctggccaggccctggaccatccctgggtgatcaccatggctgcagggtcttccatgaagaatctccagagggccatatcccgaaacctcatgcagagggcctctccccactctcagagtcctggatctgcacagtcttctaagtcacattattctcacaaatccaggcatatgtggagcaagagaaacttaaggatagtagaatcgccactgtctgcgcttttgtaa

SEQ ID NO: 267 - protein, 385 aa, Homo Sapiens
MGCGASRKVVPGPPALAWAKHEGQNQAGVGGAGPGPEAAAQAAQRIQVARFRAKFDPRVLARYDIKALIGTGSFSRVVRVEQKTTKKPFAIKVMETREREGREACVSELSVLRRVSHRYIVQLMEIFETEDQVYMVMELATGGELFDRLIAQGSFTERDAVRILQMVADGIRYLHALQITHRNLKPENLLYYHPGEESKILITDFGLAYSGKKSGDWTMKTLCGTPEYIAPEVLLRKPYTSAVDMWALGVITYALLSGFLPFDDESQTRLYRKILKGKYNYTGEPWPSISHLAKDFIDKLLILEAGHRMSAGQALDHPWVITMAAGSSMKNLQRAISRNLMQRASPHSQSPGSAQSSKSHYSHKSRHMWSKRNLRIVESPLSALL

SEQ ID NO: 268 - DNA, 1440 bp, Homo Sapiens
  CDS (1)...(1440)
atggacgccactatcgccccgcaccgtatcccccccgagatgccccagtacggggaggagaaccacatcttcgagttgatgcagaacatgctggagcaactcctgatccaccagcccgaagatcccatccccttcatgatccagcacttgcatagagacaacgacaatgtgcccaggattgtaatattaggtccacccgcctcagggaaaacaacaatagcaatgtggctctgcaaacatctgaacagcagtctcctcaccctggagaacctgatcttaaatgagttttcctatacggccaccgaagccagaaggctttatctgcaaaggaagacagttcccagcgcgctgctcgtccagctgattcaggaacgcctggctgaagaggattgcatcaagcagggctggattctggatggcatccctgagacgcgtgagcaggctctgaggatccagaccctggggatcacacccagacacgtcattgtgctgagtgctccagacacggtcctgatcgagagaaacttggggaagagaatcgaccctcaaactggagagatttatcacaccacctttgactggccacccgaatctgaaatccagaaccgtctcatggtgccagaggacatctcagagctggagacggctcagaaactgctggagtatcataggaacatcgtcagggtcattccctcctaccccaaaatcctcaaagtcatcagtgctgaccagccatgtgtggacgtcttctaccaggctctgacctatgtccaaagcaaccatcgtactaatgccccgttcaccccgagggtgctgctgctcgggcctgtgggcagtgggaaaagtctgcaggccgccctcctggcccagaaatacaggcttgtcaatgtctgctgtgggcaactgctgaaagaggctgtggcagataggaccacgtttggcgagctcatccagcccttctttgaaaaggagatggcagttcctgacagcctcctcatgaaggtgctgagccagcgcctggaccagcaggactgcatccagaaaggctgggtgctacacggcgtcccgcgggacctcgaccaggcacacctgctgaaccgcctgggctacaatcccaacagggtgtttttcctgaatgtgccatttgattccatcatggagcggctgactctgagaagaattgatccagtcactggggaaaggtaccacctcatgtacaagccacctcccaccatggagatccaggctcgcctcctgcagaacccaaaggatgctgaagagcaggtcaagctgaaaatggacctgttctacaggaactcagctgacttggagcagttgtatgggtcggccatcaccctcaatggggaccaggacccatacacagtcttcgaatacatcgagagtgggatcattaatcccctgcccaagaaaatcccctga

SEQ ID NO: 269 - protein, 479 aa, Homo Sapiens
MDATIAPHRIPPEMPQYGEENHIFELMQNMLEQLLIHQPEDPIPFMIQHLHRDNDNVPRIVILGPPASGKTTIAMWLCKHLNSSLLTLENLILNEFSYTATEARRLYLQRKTVPSALLVQLIQERLAEEDCIKQGWILDGIPETREQALRIQTLGITPRHVIVLSAPDTVLIERNLGKRIDPQTGEIYHTTFDWPPESEIQNRLMVPEDISELETAQKLLEYHRNIVRVIPSYPKILKVISADQPCVDVFYQALTYVQSNHRTNAPFTPRVLLLGPVGSGKSLQAALLAQKYRLVNVCCGQLLKEAVADRTTFGELIQPFFEKEMAVPDSLLMKVLSQRLDQQDCIQKGWVLHGVPRDLDQAHLLNRLGYNPNRVFFLNVPFDSIMERLTLRRIDPVTGERYHLMYKPPPTMEIQARLLQNPKDAEEQVKLKMDLFYRNSADLEQLYGSAITLNGDQDPYTVFEYIESGIINPLPKKIP

SEQ ID NO: 270 - DNA, 285 bp, Homo Sapiens
  CDS (1)...(285)
atggagcggctgactctgagaagaattgatccagtcactggggaaaggtaccacctcatgtacaagccacctcccaccatggagatccaggctcgcctcctgcagaacccaaaggatgctgaagagcaggtcaagctgaaaatggacctgttctacaggaactcagctgacttggagcagttgtatgggtcggccatcaccctcaatggggaccaggacccatacacagtcttcgaatacatcgagagtgggatcattaatcccctgcccaagaaaatcccctga

SEQ ID NO: 271 - protein, 94 aa, Homo Sapiens
MERLTLRRIDPVTGERYHLMYKPPPTMEIQARLLQNPKDAEEQVKLKMDLFYRNSADLEQLYGSAITLNGDQDPYTVFEYIESGIINPLPKKIP

SEQ ID NO: 272 - DNA, 1938 bp, Homo Sapiens
  CDS (1)...(1938)
atgctgaaattccaagaggcagctaagtgtgtgagtggatcaacagccatttccacttatccaaagaccttgattgcaagaagatacgtgcttcaacaaaaacttggcagtggaagttttggaactgtctatctggtttcagacaagaaagccaaacgaggagaggaattaaaggtacttaaggaaatatctgttggagaactaaatccaaatgaaactgtacaggccaatttggaagcccaactcctctccaagctggaccacccagccattgtcaagttccatgcaagttttgtggagcaagataatttctgcattatcacggagtactgtgagggccgagatctggacgataaaattcaggaatataaacaagctggaaaaatctttccagaaaatcaaataatagaatggtttatccagctgctgctgggagttgactacatgcatgagaggaggatacttcatcgagacttaaagtcaaagaatgtatttctgaaaaataatctccttaaaattggagattttggagtttctcgacttctaatgggatcctgtgacctggccacaactttaactggaactccccattatatgagtcctgaggctctgaaacaccaaggctatgacacaaagtcggacatctggtcactggcatgcattttgtatgagatgtgctgcatgaatcatgcattcgctggctccaatttcttatccattgttttaaaaattgttgaaggtgacacaccttctctccctgagagatatccaaaagaactaaatgccatcatggaaagcatgttgaacaagaatccttcattaagaccatctgctatcgaaattttaaaaatcccttaccttgatgagcagctacagaacctaatgtgtagatattcagaaatgactctggaagacaaaaatttggattgtcagaaggaggctgctcatataattaatgccatgcaaaaaaggatccacctgcagactctgagggcactgtcagaagtacagaaaatgacgccaagagaaaggatgcggctgaggaagctccaggcggctgatgagaaagccaggaagctgaaaaagattgtggaagaaaaatatgaagaaaatagcaaacgaatgcaagaattgagatctcggaactttcagcagctgagtgttgatgtactccatgaaaaaacacatttaaaaggaatggaagaaaaggaggagcaacctgagggaagactttcttgttcaccccaggacgaggatgaagagaggtggcaaggcagggaagaggaatctgatgaaccaactttagagaacctgcctgagtctcagcctattccttccatggacctccacgaacttgaatcaattgtagaggatgccacatctgaccttggataccatgagatcccagaagacccacttgtggctgaagagtactacgctgatgcatttgattcctattgtgtagagagtgatgaggaggaagaagaaatagcgttagaaagaccagagaaagaaatcaggaatgagggatcccagcctgcttacagaacaaaccaacaggacagtgatatcgaagcgttggccaggtgtttggaaaatgtcctgggttgcacttctctagacacaaagaccatcaccaccatggctgaagacatgtccccaggaccaccaattttcaacagtgtgatggccaggaccaagatgaaacgcatgagggaatcagccatgcagaagctggggacagaagtatttgaagaggtctataattacctcaagagagcaaggcatcagaatgctagcgaagcagagatccgcgagtgtttggaaaaagtggtgcctcaagccagcgactgttttgaagtggaccagctcctgtactttgaagagcagttgctgatcacgatgggaaaagaacctactctccagaaccatctctag

SEQ ID NO: 273 - protein, 645 aa, Homo Sapiens
MLKFQEAAKCVSGSTAISTYPKTLIARRYVLQQKLGSGSFGTVYLVSDKKAKRGEELKVLKEISVGELNPNETVQANLEAQLLSKLDHPAIVKFHASFVEQDNFCIITEYCEGRDLDDKIQEYKQAGKIFPENQIIEWFIQLLLGVDYMHERRILHRDLKSKNVFLKNNLLKIGDFGVSRLLMGSCDLATTLTGTPHYMSPEALKHQGYDTKSDIWSLACILYEMCCMNHAFAGSNFLSIVLKIVEGDTPSLPERYPKELNAIMESMLNKNPSLRPSAIEILKIPYLDEQLQNLMCRYSEMTLEDKNLDCQKEAAHIINAMQKRIHLQTLRALSEVQKMTPRERMRLRKLQAADEKARKLKKIVEEKYEENSKRMQELRSRNFQQLSVDVLHEKTHLKGMEEKEEQPEGRLSCSPQDEDEERWQGREEESDEPTLENLPESQPIPSMDLHELESIVEDATSDLGYHEIPEDPLVAEEYYADAFDSYCVESDEEEEEIALERPEKEIRNEGSQPAYRTNQQDSDIEALARCLENVLGCTSLDTKTITTMAEDMSPGPPIFNSVMARTKMKRMRESAMQKLGTEVFEEVYNYLKRARHQNASEAEIRECLEKVVPQASDCFEVDQLLYFEEQLLITMGKEPTLQNHL

SEQ ID NO: 274 - DNA, 1449 bp, Homo Sapiens
  CDS (1)...(1449)
atgctgaaattccaagaggcagctaagtgtgtgagtggatcaacagccatttccacttatccaaagaccttgattgcaagaagatacgtgcttcaacaaaaacttggcagtggaagttttggaactgtctatctggtttcagacaagaaagccaaacgaggagaggaattaaaggtacttaaggaaatatctgttggagaactaaatccaaatgaaactgtacaggccaatttggaagcccaactcctctccaagctggaccacccagccattgtcaagttccatgcaagttttgtggagcaagataatttctgcattatcacggagtactgtgagggccgagatctggacgataaaattcaggaatataaacaagctggaaaaatctttccagaaaatcaaataatagaatggtttatccagctgctgctgggagttgactacatgcatgagaggaggatacttcatcgagacttaaagtcaaagaatgtatttctgaaaaataatctccttaaaattggagattttggagtttctcgacttctaatgggatcctgtgacctggccacaactttaactggaactccccattatatgagtcctgaggctctgaaacaccaaggctatgacacaaagtcggacatctggtcactggcatgcattttgtatgagatgtgctgcatgaatcatgcattcgctggctccaatttcttatccattgttttaaaaattgttgaaggtgacacaccttctctccctgagagatatccaaaagaactaaatgccatcatggaaagcatgttgaacaagaatccttcattaagaccatctgctatcgaaattttaaaaatcccttaccttgatgagcagctacagaacctaatgtgtagatattcagaaatgactctggaagacaaaaatttggattgtcagaaggaggctgctcatataattaatgccatgcaaaaaaggatccacctgcagactctgagggcactgtcagaagtacagaaaatgacgccaagagaaaggatgcggctgaggaagctccaggcggctgatgagaaagccaggaagctgaaaaagattgtggaagaaaaatatgaagaaaatagcaaacgaatgcaagaattgagatctcggaactttcagcagctgagtgttgatgtactccatgaaaaaacacatttaaaaggaatggaagaaaaggaggagcaacctgagggaagactttcttgttcaccccaggacgaggatgaagagaggtggcaaggcagggaagaggaatctgatgaaccaactttagagaacctgcctgagtctcagcctattccttccatggacctccacgaacttgaatcaattgtagaggatgccacatctgaccttggataccatggagactgtaatctaatttcactagacgaatactggaaaaatgaaaaataa

SEQ ID NO: 275 - protein, 482 aa, Homo Sapiens
MLKFQEAAKCVSGSTAISTYPKTLIARRYVLQQKLGSGSFGTVYLVSDKKAKRGEELKVLKEISVGELNPNETVQANLEAQLLSKLDHPAIVKFHASFVEQDNFCIITEYCEGRDLDDKIQEYKQAGKIFPENQIIEWFIQLLLGVDYMHERRILHRDLKSKNVFLKNNLLKIGDFGVSRLLMGSCDLATTLTGTPHYMSPEALKHQGYDTKSDIWSLACILYEMCCMNHAFAGSNFLSIVLKIVEGDTPSLPERYPKELNAIMESMLNKNPSLRPSAIEILKIPYLDEQLQNLMCRYSEMTLEDKNLDCQKEAAHIINAMQKRIHLQTLRALSEVQKMTPRERMRLRKLQAADEKARKLKKIVEEKYEENSKRMQELRSRNFQQLSVDVLHEKTHLKGMEEKEEQPEGRLSCSPQDEDEERWQGREEESDEPTLENLPESQPIPSMDLHELESIVEDATSDLGYHGDCNLISLDEYWKNEK

SEQ ID NO: 276 - DNA, 2847 bp, Homo Sapiens
ccgcgccgtctccctggccacggttccaaacagccgtggcccgcggtgtctggcgctcggtgggtgtggttgcccctagtttgaggcctgcccgattacccgcaagacttgggcagccccgggcgccgctccgaccacgacagggaaaggaaccttaatctcatctttaaaataaggagaattactgagtgacctgaaggacccttttcagctggaaagtctgaactgaccaacactggatgaatttgaccatttcttaggagactggaatgttaagtttctataaatgaatgaaccagttctctcttgtttggagcaatgctgaaattccaagaggcagctaagtgtgtgagtggatcaacagccatttccacttatccaaagaccttgattgcaagaagatacgtgcttcaacaaaaacttggcagtggaagttttggaactgtctatctggtttcagacaagaaagccaaacgaggagaggaattaaaggtacttaaggaaatatctgttggagaactaaatccaaatgaaactgtacaggccaatttggaagcccaactcctctccaagctggaccacccagccattgtcaagttccatgcaagttttgtggagcaagataatttctgcattatcacggagtactgtgagggccgagatctggacgataaaattcaggaatataaacaagctggaaaaatctttccagaaaatcaaataatagaatggtttatccagctgctgctgggagttgactacatgcatgagaggaggatacttcatcgagacttaaagtcaaagaatgtatttctgaaaaataatctccttaaaattggagattttggagtttctcgacttctaatgggatcctgtgacctggccacaactttaactggaactccccattatatgagtcctgaggctctgaaacaccaaggctatgacacaaagtcggacatctggtcactggcatgcattttgtatgagatgtgctgcatgaatcatgcattcgctggctccaatttcttatccattgttttaaaaattgttgaaggtgacacaccttctctccctgagagatatccaaaagaactaaatgccatcatggaaagcatgttgaacaagaatccttcattaagaccatctgctatcgaaattttaaaaatcccttaccttgatgagcagctacagaacctaatgtgtagatattcagaaatgactctggaagacaaaaatttggattgtcagaaggaggctgctcatataattaatgccatgcaaaaaaggatccacctgcagactctgagggcactgtcagaagtacagaaaatgacgccaagagaaaggatgcggctgaggaagctccaggcggctgatgagaaagccaggaagctgaaaaagattgtggaagaaaaatatgaagaaaatagcaaacgaatgcaagaattgagatctcggaactttcagcagctgagtgttgatgtactccatgaaaaaacacatttaaaaggaatggaagaaaaggaggagcaacctgagggaagactttcttgttcaccccaggacgaggatgaagagaggtggcaaggcagggaagaggaatctgatgaaccaactttagagaacctgcctgagtctcagcctattccttccatggacctccacgaacttgaatcaattgtagaggatgccacatctgaccttggataccatgagatcccagaagacccacttgtggctgaagagtactacgctgatgcatttgattcctattgtgtagagagtgatgaggaggaagaagaaatagcgttagaaagaccagagaaagaaatcaggaatgagggatcccagcctgcttacagaacaaaccaacaggacagtgatatcgaagcgttggccaggtgtttggaaaatgtcctgggttgcacttctctagacacaaagaccatcaccaccatggctgaagacatgtccccaggaccaccaattttcaacagtgtgatggccaggaccaagatgaaacgcatgagggaatcagccatgcagaagctggggacagaagtatttgaagaggtctataattacctcaagagagcaaggcatcagaatgctagcgaagcagagatccgcgagtgtttggaaaaagtggtgcctcaagccagcgactgttttgaagtggaccagctcctgtactttgaagagcagttgctgatcacgatgggaaaagaacctactctccagaaccatctctaggcaactatcaaaaagaagcagaagttcaagtggacaaatttatgtgaaaattcatttaacatataagctgaactctattatggggaatggatacaaaagcagagctcccatcttgactttcaattcctcatcagaagtactggcttctttagagagtagtaagcatggctgcctatgcttggagtcataagtgttatttggactataccctgagataagcttatagatcaagtttggctcccttgaaaagcatttctctcatgtgcgccctcagggcttccagcaggattgagtcaccctgacgatgaccgggagaagccgtgtgctcttcattattttcagctggaggacagagctcagtgcctgactgcctagggtctcatggactgtaggcagcctgccagtgaaggtcactggactctagcctacaacatgctgagctacagcccagaagccagacatgcctgtcttagctgacctgtttttggtccacttttgcccttccatgactaataaggaagatatgtgtgtatttcatacacacacaaggacctggattaaaaatccaaaaagtgaaaaaaaaaaaaaaaa

SEQ ID NO: 277 - DNA, 1080 bp, Homo Sapiens
  CDS (1)...(1080)
atggagcgcagggcctccgagacccctgaggatggggacccagaggaggacacagccacagccctccaacggctggtggagctgacgaccagcagggtgaccccggtgaggagccttcgggaccagtaccacctcatccggaagctgggctccggctcctacggccgcgtgctcctcgcccagcctcaccaggggggtccagctgtggctctgaagctcctgcgtcgggatttggtcctgagaagcaccttcctgagggagttctgtgtgggccgctgcgtctctgcacacccaggcctgctgcagaccctggcaggacccctacagaccccccgctattttgccttcgcccaggagtacgcgccctgtggggacctcagcgggatgctgcaggaaaggggcctcccagaactgctggtgaagcgggtggtggcccagttggcaggagctctggacttcctccacagccgggggctggtccacgcagatgtcaaacctgacaacgtgctggtcttcgacccagtctgcagccgtgtggccctgggagacctgggtctgacccggccagagggcagcccgacccccgccccaccagtgcctctgcccacggcaccgcctgagctctgtctcctgctaccgcccgacaccctgcctctgcggccagccgtggactcctggggcctgggggtgcttctcttctgtgctgccactgcctgtttcccttgggacgtggcactggcccccaaccctgagttcgaggccttcgctggctgggtgaccaccaagcctcagccacctcagccaccaccaccctgggaccagtttgcgcccccagccctggccttgctccaggggcttctggacctggatcccgagactaggagccccccactggctgtcctggacttcctgggggacgactgggggttgcaagggaacagagagggacctggggttttggggagcgccgtgtcctatgaggacagggaggagggaggctcaagcctggaggagtggacagatgagggtgatgacagcaaaagtggtgggaggacggggacagatgggggagctccctga

SEQ ID NO: 278 - protein, 359 aa, Homo Sapiens
MERRASETPEDGDPEEDTATALQRLVELTTSRVTPVRSLRDQYHLIRKLGSGSYGRVLLAQPHQGGPAVALKLLRRDLVLRSTFLREFCVGRCVSAHPGLLQTLAGPLQTPRYFAFAQEYAPCGDLSGMLQERGLPELLVKRVVAQLAGALDFLHSRGLVHADVKPDNVLVFDPVCSRVALGDLGLTRPEGSPTPAPPVPLPTAPPELCLLLPPDTLPLRPAVDSWGLGVLLFCAATACFPWDVALAPNPEFEAFAGWVTTKPQPPQPPPPWDQFAPPALALLQGLLDLDPETRSPPLAVLDFLGDDWGLQGNREGPGVLGSAVSYEDREEGGSSLEEWTDEGDDSKSGGRTGTDGGAP

SEQ ID NO: 279 - DNA, 1584 bp, Homo Sapiens
gatagacggagcaagagagaggctgacagaaaggtgttcctgtagaaggaaggagagactggggttggctaaagagaggggaagagagggtgtggggagtaagggctatcacctgggaagcacagcagggaatacacccagagggtggcaggagggcacagagaggcagagacactcctccagctagacagagccggacagacaaggggcgactgaggctgaccttgcagacgagcttccatcccttggctctgcgcagcgagaacctgtggggtgcagggggctggttgctttctggggagccctgacgggggggtcccgcccaagggccaccccacatcaggaagccctgagatggagcgcagggcctccgagacccctgaggatggggacccagaggaggacacagccacagccctccaacggctggtggagctgacgaccagcagggtgaccccggtgaggagccttcgggaccagtaccacctcatccggaagctgggctccggctcctacggccgcgtgctcctcgcccagcctcaccaggggggtccagctgtggctctgaagctcctgcgtcgggatttggtcctgagaagcaccttcctgagggagttctgtgtgggccgctgcgtctctgcacacccaggcctgctgcagaccctggcaggacccctacagaccccccgctattttgccttcgcccaggagtacgcgccctgtggggacctcagcgggatgctgcaggaaaggggcctcccagaactgctggtgaagcgggtggtggcccagttggcaggagctctggacttcctccacagccgggggctggtccacgcagatgtcaaacctgacaacgtgctggtcttcgacccagtctgcagccgtgtggccctgggagacctgggtctgacccggccagagggcagcccgacccccgccccaccagtgcctctgcccacggcaccgcctgagctctgtctcctgctaccgcccgacaccctgcctctgcggccagccgtggactcctggggcctgggggtgcttctcttctgtgctgccactgcctgtttcccttgggacgtggcactggcccccaaccctgagttcgaggccttcgctggctgggtgaccaccaagcctcagccacctcagccaccaccaccctgggaccagtttgcgcccccagccctggccttgctccaggggcttctggacctggatcccgagactaggagccccccactggctgtcctggacttcctgggggacgactgggggttgcaagggaacagagagggacctggggttttggggagcgccgtgtcctatgaggacagggaggagggaggctcaagcctggaggagtggacagatgagggtgatgacagcaaaagtggtgggaggacggggacagatgggggagctccctgaccaggtgacagagacaggtggccagagcctgggccagaggcccttcccccagcccccagggccacctggatggagagacagctgcacccgggaggacagagagggaacacattgcactctccctacggaacgctgggcttggacgcgcat
